(19) United States
(12) Patent Application Publication
(10) Pub. No.: US 2022/0167576 A1
(43) Pub. Date: Jun. 2, 2022

(54) METHODS OF ENHANCING GRAIN YIELD, PLANTS AND PRODUCTS GENERATED THEREBY

(71) Applicant: International Rice Research Institute, Los Baños (PH)

(72) Inventors: Nese SREENIVASULU, Los Baños (PH); Erstelle A. PASION, Los Baños (PH); Ajay KOHLI, Los Baños (PH)

(73) Assignee: International Rice Research Institute, Los Baños (PH)

(21) Appl. No.: 17/557,130

(22) Filed: Dec. 21, 2021

Related U.S. Application Data
(63) Continuation of application No. PCT/IB2020/055840, filed on Jun. 21, 2020.
(60) Provisional application No. 62/926,585, filed on Oct. 28, 2019.
(60) Provisional application No. 62/864,548, filed on Jun. 21, 2019.

(51) Int. Cl. A01H 1/00; A01H 1/04; A01H 6/46

(52) U.S. Cl. CPC A01H 1/12; A01H 6/4636; A01H 1/045

(57) ABSTRACT

A method of enhancing grain yield of a Gramineae plant is provided. The method comprises:
(a) crossing a recipient plant with a donor plant comprising a sequence variation in a TPR allele, said sequence variation imparting enhanced grain yield; and
(b) selecting a progeny plant of said crossing comprising said sequence variation by identifying said variation, said progeny plant being characterized by an improved grain yield relative to said recipient plant. Also provided are plants and processed products resultant of the method.

### RELATED APPLICATIONS

[0001] This application is a Continuation of PCT Patent Application No. PCT/IB2020/055840 having International filing date of Jun. 21, 2020, which claims the benefit of priority under 35 USC § 119(e) of U.S. Provisional Patent Application Nos. 62/926,585 filed on Oct. 28, 2019 and 62/864,548 filed on Jun. 21, 2019. The contents of the above applications are all incorporated by reference as if fully set forth herein in their entirety.

### SEQUENCE LISTING STATEMENT

[0002] The ASCII file, entitled 90442SequenceListing.txt, created on Dec. 21, 2021, comprising 47,024,652 bytes, submitted concurrently with the filing of this application is incorporated herein by reference.

### FIELD AND BACKGROUND OF THE INVENTION

[0003] The present invention, in some embodiments thereof, relates to methods of enhancing grain yield, plants and products generated thereby.

[0004] Altering the panicle architecture of rice was a major breeding target to improve grain yield during green revolution (Zhu et al., 2013). Compact dense panicle with more primary and secondary rachis branches was preferred, resulting in more number of grains and thus increased yield (Sweeney and McCouch, 2007). Rachis branching pattern in rice mainly depends on the inflorescence meristem activity abortion. Also, delay in rachis branch meristem conversion into terminal spikelet meristem, and next order rachis branch formation lead to an altered number of secondary rachis branches (Ikeda-Kawakatsu et al., 2009).

[0005] Molecular genetics mechanisms underpinning rice panicle architecture identified yield-enhancing genes that were functionally validated using mutants or the transgenic approach (Ying et al., 2014). Genes belonging to growth-promoting hormones and transcription factor families were characterized, which influenced rachis branching and the number of grains in a panicle (Xing and Zhang, 2010). Such genes affecting the rice panicle architecture include MOC1 (Li et al., 2003), FZP (Komatsu et al., 2003), Gn1a (Ashikari et al., 2005), APO1 (Ikeda-Kawakatsu et al., 2009), DEP1 (Huang et al., 2009), SPL14 (Miura et al., 2010), LAX (Tabuchi et al., 2011), SPIKE (Fujita et al., 2013), TAWAWA1 (Yoshida et al., 2013), PAY1 (Lu et al., 2013), FUWA (Chen et al., 2015); Ghd7 (Weng et al., 2014), OsNAM12.1 (Dixit et al., 2015), GRF4 (Sun et al., 2016), and DWARF11 (Wu et al., 2016) among others.

[0006] Increase in grain number targeted through more secondary rachis branches can create a tradeoff between yield and grain quality (Mohapatra, 2013). Inferior grains (in the lower part of the panicle) formed due to secondary rachis branches have inordinate protein content, poor palatability and reduced milling quality due to high chalk as compared to the grains located on the primary rachis branches (Matsue et al., 1994; Matsue et al., 1995). Paradoxically, the number of secondary rachis branches is more important for yield than the number of primary rachis branches (Adriani et al., 2016). Increase in the number of grains on upper secondary rachis branches can improve grain quality including lower reduction in grain weight (Wang et al., 2008). The trade-off between yield-enhancing factors and maintaining better grain quality must be considered to ensure wider adoption of high yielding rice varieties (Das et al., 2018). Genes that increase the number of secondary rachis branches bearing grains that are not compromised for quality traits are thus desirable for a meaningful increase in yield.

### SUMMARY OF THE INVENTION

[0007] According to an aspect of some embodiments of the present invention there is provided a method of enhancing grain yield of a Gramineae plant, the method comprising:

[0008] (a) crossing a recipient plant with a donor plant comprising a sequence variation in a TPR allele, the sequence variation imparting enhanced grain yield; and

[0009] (b) selecting a progeny plant of the crossing comprising the sequence variation by identifying said variation, the progeny plant being characterized by an improved grain yield relative to the recipient plant.

[0010] According to an aspect of some embodiments of the present invention there is provided a method of enhancing grain yield of a Gramineae plant, the method comprising:

[0011] (a) crossing a recipient plant with a donor plant comprising a TPR allele of haplotype I; and

[0012] (b) selecting a progeny plant of the crossing comprising the TPR allele of haplotype I by identifying said variation, the progeny plant being characterized by an improved grain yield relative to the recipient plant.

[0013] According to some embodiments of the invention, the recipient plant is heterozygous for the sequence variation or haplotype I.

[0014] According to some embodiments of the invention, the recipient plant is null for the sequence variation or haplotype I.

[0015] According to some embodiments of the invention, the selecting is based on phenotypic screening for a grain yield- and/or grain quality-associated trait.

[0016] According to some embodiments of the invention, the selecting is by marker-assisted selection.

[0017] According to some embodiments of the invention, the marker-assisted selection is by a method selected from the group consisting of: allele-specific hybridization; Southern analysis; Northern analysis; in situ hybridization, deep-sequencing; and hybridization of primers followed by polymerase chain reaction amplification of a region of a marker.

[0018] According to some embodiments of the invention, the method further comprises:

[0019] (c) backcrossing the one or more of selected progeny plants to produce backcross progeny plants; and

[0020] (d) selecting a backcross progeny plant comprising the sequence variation or haplotype I, the progeny plant being characterized by an improved grain yield relative to the recipient plant.

[0021] According to some embodiments of the invention, (c) and (d) are repeated one or more times.

[0022] According to some embodiments of the invention, the donor and/or recipient plant is a rice plant.

[0023] According to some embodiments of the invention, the recipient plant is a rice plant selected from the group consisting of: the Indica rice group; the Japonica rice group; and the Glaberrima rice group.

[0024] According to some embodiments of the invention, the donor plant is a rice plant of the Indica rice group.

[0025] According to some embodiments of the invention, the recipient plant is a rice plant of the Indica rice group.

[0026] According to some embodiments of the invention, the recipient rice plant is of a variety comprising a sequence variation in a gene selected from the group consisting of D11, MOC1, and MYB4P.

[0027] According to some embodiments of the invention, the method comprises breeding the recipient plant, donor plant or progeny plant to comprise a sequence variation in a gene selected from the group consisting of D11, MOC1, and MYB4P.

[0028] According to some embodiments of the invention, the recipient plant or the progeny comprises a sequence variation in a gene selected from the group consisting of D11, MOC1, and MYB4P is show in Table A.

[0029] According to some embodiments of the invention, the grain quality-associated trait is selected from the group consisting of amylose content, chalkiness, gel temperature, viscosity, retrogradation, and cooking traits such as the cooked grain length or width.

[0030] According to some embodiments of the invention, the grain yield is manifested by at least one of TSP, USRB and head rice yield.

[0031] According to an aspect of some embodiments of the present invention there is provided a plant obtainable according to the method as described herein.

[0032] According to an aspect of some embodiments of the present invention there is provided an elite line of a Gramineae plant comprising a sequence variation in a TPR allele or a haplotype I, the plant being characterized by an improved grain yield as compared to a control plant.

[0033] According to some embodiments of the invention, the recipient rice plant comprises a sequence variation in a gene selected from the group consisting of D11, MOC1, and MYB4P.

[0034] According to some embodiments of the invention the plant is a rice plant.

[0035] According to an aspect of some embodiments of the present invention there is provided a part of the plant (e.g., seed, grain) as described herein.

[0036] According to an aspect of some embodiments of the present invention there is provided a processed product comprising DNA of the plant as described herein.

[0037] According to some embodiments of the invention, the sequence variation comprises at least one SNP selected from the group of SNPs shown in FIGS. 15-16.

[0038] Unless otherwise defined, all technical and/or scientific terms used herein have the same meaning as commonly understood by one of ordinary skill in the art to which the invention pertains. Although methods and materials similar or equivalent to those described herein can be used in the practice or testing of embodiments of the invention, exemplary methods and/or materials are described below. In case of conflict, the patent specification, including definitions, will control. In addition, the materials, methods, and examples are illustrative only and are not intended to be necessarily limiting.

### BRIEF DESCRIPTION OF THE SEVERAL VIEWS OF THE DRAWING(S)

[0039] The patent or application file contains at least one drawing executed in color. Copies of this patent or patent application publication with color drawing(s) will be provided by the Office upon request and payment of the necessary fee.

[0040] Some embodiments of the invention are herein described, by way of example only, with reference to the accompanying drawings. With specific reference now to the drawings in detail, it is stressed that the particulars shown are by way of example and for purposes of illustrative discussion of embodiments of the invention. In this regard, the description taken with the drawings makes apparent to those skilled in the art how embodiments of the invention may be practiced.

[0041] In the drawings:

[0042] FIG. 1 is a scheme showing correlations of multiple panicle traits. Correlations of primary rachis branches (PRB) and secondary rachis branches (SRB) at different panicle levels (bottom: BPRB, BSRB; middle: MPRB, MSRB; upper: UPRB, USRB; entire panicle: TPRB, TSRB), and total number of spikelets (TSP) per panicle of 310 resequenced indica accessions with colored boxes (shades of green) significant at 95% confidence level.

[0043] FIGS. 2A, 2B, 2C and 2D shows significant genetic variants in chromosomes 1 and 2 that are associated with USRB. (A) Manhattan plot depicting results of EMMAX associations tested across 12 rice chromosomes revealed significant peaks of multiple SNPs (lightgreen highlight) from chromosomes 1 and 2 associated to USRB rising above the suggestive line threshold (blue line) at q<0.0500 and p<1.5314E-05. (B) Quantile-quantile plot showed samples were unrelated and the sample population was normally distributed with evidence of inflation factor (0.95) less than 1.03 threshold. (C) Barplot depicting negative logarithm of the p-values and corresponding beta values (thicker bar: higher beta value, black color: positive effect; red color: negative effect) of tag SNPs belonging to different haplotype blocks within the significant region in Chromosome 2 associated to USRB. (D) USRB variation of the indica samples as explained by distinct haplotype blocks represented by tag SNPs within the significant region in Chromosome 2 associated to USRB based on GWAS results. Asterisks in boxplots indicate significant difference using two-tailed t-test (*P<0.05, **P<0.01, ***P<0.001, ****P<0.0001).

[0044] FIG. 3 shows phenotypic variation explained by significant nonsynonymous SNPs of OsTPR possibly regulated by important flower-related transcription factors, and allelic variation of OsTPR among O. sativa subgroups. Haplotypes formed with an upstream SNP overlapping flower-related cis-motifs (SPL3 and SPL14) in the promoter region of OsTPR plus six nonsynonymous genic SNPs of OsTPR revealed superior allele (AGGATCA, SEQ ID NO: 1) explaining higher branching-related traits and spikelet number but lower percent chalkiness, as compared to other alleles such as TATTCGG (SEQ ID NO: 2), TATACCG (SEQ ID NO: 3), and TATTCCG (SEQ ID NO: 4) which showed lower TSP and branching-related traits. Haplotype TATTCCG also showed highest chalkiness percentage among other haplotypes. Asterisks in boxplots indicate significant difference using two-tailed t-test (*P<0.05, **P<0.01, ***P<0.001, ****P<0.0001). The superior haplotype AGGATCA was also found to be enriched within indica subspecies while one of the inferior haplotypes, TATACCG (SEQ ID NO: 3), was abundantly present in japonica and other rice subspecies found in the 3,000 rice genomes in SNP-Seek Database. Panicle architectures of lines with high USRB (HUSRB, SEQ ID NO: 5) are present above the panicle architectures of lines with low USRB (LUSRB, SEQ ID NO: 6).

[0045] FIGS. 4A, 4B and 4C show nucleotide diversity calculation among different rice subgroups using OsTPR SNPs. Nucleotide diversity values were higher in indica subgroup compared to japonica or aromatic subgroups from SNP-Seek Database using either (A) the index SNPs from whole LD block significant region in Chromosome 2 where OsTPR was located, or (B) the seven significant SNPs of OsTPR. (C) Phylogenetic analysis of 13 crop species using OsTPR protein orthologues showed closer relationship of Oryza sativa subsp. indica to O. nivara, while O. sativa subsp. japonica was more related to Oryza rufipogon.

[0046] FIG. 5 shows an association network of SNPs with different branching-related traits and spikelet number of O. sativa subsp. indica. Multiple SNPs were significantly associated (P<0.05) to secondary rachis branches (SRB) at different panicle levels: bottom (BSRB), middle (MSRB), upper (USRB), and entire panicle (TSRB); total primary rachis branches (TPRB); and total number of spikelets (TSP) of indica samples based on multi-locus GWAS (blue nodes) and targeted association analysis (red nodes). Most common SNPs were found in OsTPR (pink edge) and reported genes related to panicle architecture such as DWARF11, MOC1, and TPR genes. Edge associations were based on beta-effects.

[0047] FIG. 6 shows a comparison of superior and inferior lines in terms of traits related to panicle architecture, yield, quality, and grain appearance as explained by different haplotypes of D11, MOC1, MYB4P and TPR. Superior lines (green) have TSP 1.5 times higher than the mean TSP (147.59) of all the 309 lines while inferior lines (orange) have TSP 1.5 times lower than the mean TSP. With some exceptions, superior lines usually had the superior alleles of the four prominent genes—D11, MOC1, MYB4P, and TPR—regulating panicle architecture traits based on slGWAS, targeted association analysis, and mlGWAS, while inferior lines possess at least one inferior allele of the aforementioned genes. Spirographs further showed distinction of the superior and inferior lines in terms of different sets of traits related to panicle architecture, yield and quality phenotypes with values normalized using common logarithm. Rootless phylogenetic tree constructed with D11, MOC1, MYB4P, and TPR significant SNPs showed unclear relationship of inferior and superior lines.

[0048] FIGS. 7A and 7B show coexpression analysis results. (A) Hierarchical clustering dendrogram and gene regulatory network derived from genes involved in different panicle developmental stages (>1 mm, 3-5 mm, 10-15 mm, 40-50 mm, and heading stage). (B) Network of genes co-expressed in the module containing the candidate gene OsTPR reflecting interactions at edge weight >=0.30089 with node sizes representing the degree of connectivity and the central hub gene marked with thick black border. OsTPR was found to be strongly coexpressed with multiple known genes related to panicle development such as D11, MOC2, LAX, SPL14, and APO2, among others.

[0049] FIG. 8 shows the population used in the present study of diverse resequenced O. sativa subsp. indica samples. Frequency distribution in terms of total number of spikelets and secondary rachis branch-related traits along with corresponding heritability values of the 310 resequenced indica samples and their country of origin.

[0050] FIG. 9 shows the OsTPR gene structure. Gene model prediction revealed one long gene (24,444 bp) consisting of LOC_Os02g50790 (SEQ ID NO: 25) and LOC_Os02g50799 (SEQ ID NO: 27) which both encode nuclear-pore anchor proteins (SEQ ID NO: 26 and SEQ ID NO: 28, respectively).

[0051] FIG. 10 shows phenotypic variation of the O. sativa subsp. indica samples as explained by OsTPR haplotypes in terms of panicle architecture, grain yield, and grain quality traits. Apparent tradeoffs and differences were observed between superior and inferior haplotypes in terms of the number of panicle components, number of panicles per plant, grain filling attributes, grain weight and some grain quality traits. The superior haplotype, AGGATCA, also showed high number of spikelets and branching-related traits and low chalkiness, whereas one of the inferior haplotypes, TATTCCG (SEQ ID NO: 4), had low number of spikelets and branching-related traits and very high chalkiness. Asterisks in boxplots indicate significant difference using two-tailed t-test (*P<0.05, **P<0.01, ***P<0.001, ****P<0.0001).

[0052] FIGS. 11A, 11B, 11C and 11D show D11 and MOC1 significant SNPs explaining phenotypic variation and correlations among indica samples, and their allelic abundance among different O. sativa subgroups. (A) Phenotypic variation in terms of traits related to panicle architecture, head rice yield, and chalkiness of O. sativa subsp. indica samples as explained by D11 and MOC1 haplotypes formed by significant SNPs. Asterisks in boxplots indicate significant difference using two-tailed t-test (*P<0.05, **P<0.01, ***P<0.001, ****P<0.0001). (B) Percent allelic abundance of D11/MOC1 haplotypes among different rice subgroups from 3,000 rice genomes in SNP-Seek Database. (C) Different sets of correlations for multiple phenotypes of indica samples having specific combinations of superior (AAT^{D11}, CG^{MOC1}) and Inferior (GGC^{D11}, GA^{MOC1}) alleles from D11 and MOC1. Shaded boxes (green: positive correlation; violet: negative correlation) significant at 95% confidence level. (D) Gene structures of D11 and MOC1 highlighting the significant SNPs used to form the haplotypes.

[0053] FIGS. 12A, 12B, 12C and 12D show TPR and MYB4P significant SNPs explaining phenotypic variation and correlations among indica samples, and their allelic abundance among different O. sativa subgroups. (A) Phenotypic variation in terms of traits related to panicle architecture, head rice yield, and chalkiness of O. sativa subsp. indica samples as explained by TPR and MYB4P haplotypes formed by significant SNPs. Asterisks in boxplots indicate significant difference using two-tailed t-test (*P<0.05, **P<0.01, ***P<0.001, ****P<0.0001). (B) Percent allelic abundance of TPR/MYB4P haplotypes among different rice subgroups from 3,000 rice genomes in SNP-Seek Database. (C) Different sets of correlations for multiple phenotypes of indica samples having specific combinations of superior (AGGATCA^{TPR}, A^{MYB4P}) and inferior (TATACCG^{TPR}, G^{MYB4P}) alleles from TPR and MYB4P, respectively. Shaded boxes (green: positive correlation; violet: negative correlation) significant at 95% confidence level. (D) Gene structures of TPR and MYB4P highlighting the significant SNPs used to form the haplotypes.

[0054] FIG. 13 shows phenotypic variation of the O. sativa subsp. indica samples as explained by D11, MOC1, OsTPR, and OsMYB4P superior and inferior haplotypes in terms of panicle architecture, grain yield, and grain quality traits. Superior lines (green) have TSP 1.5 times higher than the mean TSP (147.59) of all the 309 lines while inferior lines (orange) have TSP 1.5 times lower than the mean TSP. Although with some exceptions, superior lines usually had the superior alleles of the four prominent genes: D11 (AAT), MOC1 (CG), MYB4P (A), and TPR (AGGATCA), while inferior lines usually had inferior the alleles. Compared to inferior lines, the superior lines had significantly higher number of spikelets and branches, grain weight and grain filling without substantial changes in head rice yield and grain quality traits such as chalkiness, cooked grain dimensions, amylose content, gel consistency, trough, final viscosity, and retrogradation. Tradeoff in the number of panicles per plant was observed in superior lines relative to inferior lines. Asterisks in boxplots indicate significant difference using two-tailed t-test (*P<0.05, **P<0.01, ***P<0.001, ****P<0.0001).

[0055] FIGS. 14A and 14B show first-shell neighbors and protein interactors of OsTPR. (A) The first neighbors of the candidate gene OsTPR from the blue module in coexpression analysis were identified to be involved in different important molecular functions such as protein metabolism and RNA processing among many others based on MapMan annotation with highlights on some major genes (e.g. OsSPL14, D11, MOC2, etc.) known to be involved in panicle architecture development. (B) OsTPR predicted first-shell protein interactors and molecular actions based on different types of evidence at high confidence level (0.7) suggests the importance of OsTPR as it interacts with other proteins involved in SUMOylation, ubiquitination, and plant architecture regulation in rice.

[0056] FIG. 15 shows the protein sequence alignment of nuclear-pore anchor-encoding proteins from Arabidopsis and rice. Amino acid sequence of OsTPR (XP_015625577.1) from O. sativa Nipponbare reference genome aligned with AtTPR (AT1G79280) from Arabidopsis thaliana, with amino acids highlighted in pink representing the translocated promoter region (TPR) domain.

[0057] FIG. 16 shows comparison of amino acid substitutions in OsTPR between superior and inferior O. sativa subsp. indica samples. Six significant non-synonymous SNPs in OsTPR showed distinct amino acid substitutions between samples with high number of upper secondary rachis branches (HUSRB; IRIS_313-8536 SEQ ID NO: 21, IRIS_313-8733 SEQ ID NO: 22, IRIS_313-9605 SEQ ID NO: 23, and IRIS_313-9832 SEQ ID NO: 24) and samples with low number of upper secondary rachis branches (LUSRB; IRIS_313-10274 SEQ ID NO: 17, IRIS_313-10385 SEQ ID NO: 18, IRIS_313-9184 SEQ ID NO: 19, and IRIS_313-8405 SEQ ID NO: 20).

[0058] FIG. 17 shows SNP locations on the OsTPR sequence (SEQ ID NO: 7).

[0059] FIG. 18 provides a breeding scheme for Samba Mahsuri and IR36ae from F1 until F6 generation.

### DESCRIPTION OF SPECIFIC EMBODIMENTS OF THE INVENTION

[0060] The present invention, in some embodiments thereof, relates to methods of enhancing grain yield, plants and products generated thereby.

[0061] Before explaining at least one embodiment of the invention in detail, it is to be understood that the invention is not necessarily limited in its application to the details set forth in the following description or exemplified by the Examples. The invention is capable of other embodiments or of being practiced or carried out in various ways.

[0062] Rice is the staple for nearly half the global population. Ensuring food security by increasing crop yield of rice by meeting the demographic consumer preferences is critical. The classical tradeoff between yield increases for reduced grain quality is unacceptable in rice as value proposition defined through milling, visual and palatable qualities remain as economic drivers. The present inventors report 188 genetic loci interlinking several panicle architecture traits that increase yield and maintain grain quality as desired by rice traders and consumers. Multi-omics, single- and multi-locus GWAS, gene regulatory network and gene set analyses identified novel genes influencing secondary branching at upper and bottom part of the panicle, leading to increased superior grains. Multiple non-synonymous SNPs in a nuclear-pore anchor protein-encoding gene (OsTPR) were specifically associated with superior haplotypes of increased upper secondary rachis branches (USRB) and grain number. These grains maintained the quality traits including low chalk. This confirmed a critical role for OsTPR in influencing yield while maintaining quality and suggest directed evolution under artificial selection towards the desirable haplotype composition of the elite indica lines.

[0063] The present inventors identified additional genes D11, MOC1 or MYB4P or alleles thereof that can function optionally together with OsTPR in increasing yield.

[0064] Thus, according to an aspect there is provided a method of enhancing grain yield of a Gramineae plant, the method comprising:

[0065] (a) crossing a recipient plant with a donor plant comprising a sequence variation in a TPR allele, the sequence variation imparting enhanced grain yield; and

[0066] (b) selecting a progeny plant of the crossing comprising the sequence variation by identifying said variation, the progeny plant being characterized by an improved grain yield relative to the recipient plant.

[0067] According to an alternative aspect there is provided a method of enhancing grain yield of a Gramineae plant, the method comprising:

[0068] (a) crossing a recipient plant with a donor plant comprising a TPR allele of haplotype I; and

[0069] (b) selecting a progeny plant of the crossing comprising the TPR allele of haplotype I by identifying said variation, the progeny plant being characterized by an improved grain yield relative to the recipient plant.

[0070] So that the invention may be more readily understood, certain terms are first defined. Other definitions are provided throughout the description.

[0071] As used herein, the term “plant” refers to an entire plant, its organs (i.e., leaves, stems, roots, flowers etc.), seeds, plant cells, and progeny of the same. The term “plant cell” includes without limitation cells within seeds, suspension cultures, embryos, meristematic regions, callus tissue, leaves, shoots, gametophytes, sporophytes, pollen, and microspores. According to a specific embodiment, the plant is a plant line.

[0072] According to a specific embodiment the plant line is an elite line. The phrase “plant part” refers to a part of a plant, including single cells and cell tissues such as plant cells that are intact in plants, cell clumps, and tissue cultures from which plants can be regenerated. Examples of plant parts include, but are not limited to, single cells and tissues from pollen, ovules, leaves, embryos, roots, root tips, anthers, flowers, fruits, stems, shoots, and seeds; as well as scions, rootstocks, protoplasts, calli, and the like. According to a specific embodiment, the plant part comprises the nucleic acid variation in a TPR allele as described below. According to a specific embodiment, the plant part is a seed.

[0073] As used herein, the phrases “progeny plant” refers to any plant resulting as progeny from a vegetative or sexual reproduction from one or more parent plants or descendants thereof.

[0074] As used herein the term “Gramineae plant” refers to the cereal grass family, which cultivated species include but are not limited to maize (corn), wheat, rice, barley, rye, sorghum or millet.

[0075] According to a specific embodiment the Gramineae plant is a cultivated plant.

[0076] As used herein the term “rice” refers to a cultivated Oryza plant.

[0077] As used herein the term “cultivated Oryza plant” refers to a cultivated grass rice species having a diploid genome, 2n=24 (AA genome). Examples of domesticated Oryza species include but are not limited to, Oryza sativa (Asian rice) or Oryza glaberrima (African rice). The term may be interchanged with the term rice.

[0078] Domesticated Oryza varieties contemplated herein according to exemplary embodiments refer to long grain, short grain, white, brown, red and black.

[0079] There are three main varieties of Oryza sativa:

[0080] Indica: The indica variety is long-grained.

[0081] Japonica: Japonica rice is short-grained and high in amylopectin (thus becoming “sticky” when cooked), and is grown mainly in more temperate or colder regions such as Japan.

[0082] Javanica: Javanica rice is broad-grained and grown in tropical climates.

[0083] Other major varieties include Aromatic and Glutinos.

[0084] Allele mining using 3k rice genomes revealed that within the indica subgroup the superior haplotype 1 was enriched while the inferior haplotype 3 was least represented (FIG. 3). The superior haplotype1 was not found in japonica subgroup suggesting its importance as an approach for improving the japonica rice lines.

[0085] According to a specific embodiment, the donor plant is Indica.

[0086] According to a specific embodiment, the recipient plant is Indica or Japonica.

[0087] Within each variety, there are many recipient cultivars, each favored for particular purposes or regions. Any genetic background of domesticated Oryza e.g., Oryza sativa, can be used. Other varieties and germplasms which can be used according to the present teachings are selected from the group consisting of: IR64; Nipponbare; PM-36, PS 36, Lemont, γS 27, Arkansas Fortuna, Sri Kuning, IR36, IR72, Gaisen Ibaraki 2, Ashoka 228, IR74, NERICA 4, PS 12, Bala, Moroberekan, IR42, Akihikari, Nipponbare, IR20, IR56, IR66, NSIC Rc158, NSIC Rc222, and NSIC Rc238.

[0088] As used herein the term “maize” is also interchangeably referred to as “corn” “Zea maize L.” or “Zea maize subsp.”

[0089] As used herein “cultivated maize” refers to the conventionally grown Zea mays for human or animal food or beverages or as a source of raw materials, food supplements, chemicals or fuel.

[0090] The maize plant is diploid (2N=20) in nature.

[0091] Any genetic background of Zea maize can be used. A number of commercial varieties are available including, but not limited to:

Zea mays var. amylacea (typically used for producing corn flower)
Zea mays var. everta (typically used for producing pop-corn)
Zea mays var. indentata (Dent corn)
Zea mays var. indurata (Flint corn)
Zea mays var. saccharata and Zea mays var. rugosa (Sweet corn)
Zea mays var. ceratina (Waxy corn)
Zea mays (Amylomaize)
Zea mays var. tunicata Larrañaga ex A. St. Hil (Pod corn)
Zea mays var. japonica (Striped maize)

[0092] As used herein the term “wheat” is also interchangeably referred to as “Triticum L.” or “Triticum subsp.”.

[0093] As used herein the term “common wheat” is also interchangeably referred to as “Bread wheat” or “Triticum aestivum”.

[0094] As used herein the term “durum wheat” is also interchangeably referred to as “Macaroni wheat” or “Triticum durum Desf.” or “Triticum turgidum subsp. durum”.

[0095] Wheat is conventionally grown for human or animal food or beverages or as a source of raw materials, food supplements, chemicals or fuel. The common wheat plant is allohexaploid (6N=42) in nature, whereas the durum wheat is a tetraploid (4N=28).

[0096] Any genetic background of Triticum can be used. A number of commercial varieties are available including, but not limited to:

[0097] T. aestivum (95% of the wheat production, also known as common wheat, typically used for producing flour for baking)

[0098] T. aethiopicum (commonly known as Ethiopian wheat)

[0099] T. araraticum (commonly known as Armenian or Araratian wild emmer)

[0100] T. boeoticum (commonly known as Einkorn wheat)

[0101] T. carthlicum (commonly known as Persian wheat)

[0102] T. compactum (similar to common wheat)

[0103] T. dicoccoides (commonly known as Emmer wheat, Farro, Hulled wheat)

[0104] T. dicoccon (commonly known as Emmer wheat, Farro, Hulled wheat)

[0105] T. durum

T. ispahanicum (commonly known as Emmer wheat, Farro, Hulled wheat)
T. karamyschevii (commonly known as Emmer wheat, Farro, Hulled wheat)
T. macha
T. militinae

[0106] T. monococcum (commonly known as Einkorn wheat)

T. polonicum (commonly known as Polish wheat)
T. spelta (commonly known as Dinkel wheat)
T. timopheevii (commonly known as Zanduri wheat)
T. turanicum

[0107] T. urartu (commonly known as Einkorn wheat)

[0108] T. vavilovii

[0109] T. zhukovskyi

[0110] The term “crossed” or “cross” in the context of this invention means the fusion of gametes via pollination to produce progeny (i.e., cells, seeds or plants). The term encompasses both sexual crosses (the pollination of one plant by another) and selfing (self-pollination, i.e., when the pollen and ovule are from the same plant or from genetically identical plants).

[0111] Although the present description refers in a more detailed manner to rice, other species of Gramineae are equally envisaged.

[0112] According to a specific embodiment, the donor plant and the recipient plant are from the same species (e.g., rice/rice).

[0113] According to a specific embodiment, the donor plant and the recipient plant are from different species (e.g., rice/corn).

[0114] According to a specific embodiment, the donor plant and the recipient plant are from the same cultivar (e.g., indica/indica).

[0115] According to a specific embodiment, the donor plant and the recipient plant are from different cultivars (e.g., indica/japonica)

[0116] As used herein “enhancing” or “increasing” refers to an increase of at least 10%, 20%, 30%, 40%, 50%, 60%, 70%, 80%, 90%, 1.5 fold, 2 fold or more as compared to a control of the same genetic background without the sequence variation (i.e., control plant e.g., the recipient plant).

[0117] As used herein “reducing” or “decreasing” refers to a decrease of at least 10%, 20%, 30%, 40%, 50%, 60%, 70%, 80%, 90%, 1.5 fold, 2 fold or more as compared to a control of the same genetic background without the sequence variation (i.e., e.g., the recipient plant).

[0118] As used herein “grain yield” refers to the measure of the yield of grains per unit area of land cultivation.

[0119] Grain yield can be measured in pounds per acre, typically at 12.0% moisture. Grain yield of rice can be determined by the number of panicles per unit area, the number of fertile florets per panicle, and/or grain weight per floret. According to a specific embodiment, the grain yield is manifested by an increase in total spikelet number (TSP) per panicle.

[0120] According to a specific embodiment, the grain yield is manifested by an increase in total number of secondary rachis branches (TSRB).

[0121] According to a specific embodiment, the grain yield is manifested by an increase in upper secondary rachis branches (USRB).

[0122] According to a specific embodiment, the grain yield is manifested by an increase in middle secondary rachis branches (MSRB).

[0123] According to a specific embodiment, the grain yield is manifested by an increase in total number of primary rachis branches (TPRB).

[0124] According to a specific embodiment, the grain yield is manifested by an increase in number of upper primary rachis branches (UPRB).

[0125] According to a specific embodiment a cross between the claimed haplotype (in Samba Mahsuri) to an OsMOC1 genotype the following values were obtained (see breeding scheme on FIG. 18).

[0126] The determination of the plant architecture as mentioned by the above parameters can be done as follows: the length of each panicle starting from the first node until the last node is measured and divided by three—resulting to bottom, middle, and upper levels within the panicle. The sum of rachis branches based on category of primary or secondary is calculated for each level. This provides measurements for primary rachis branches (PRB) at the bottom (BPRB), middle (MPRB), and upper (UPRB) levels of the panicle. Similarly, this approach is used for secondary rachis branches (SRB) at the bottom (BSRB), middle, (MSRB), and upper (USRB) levels of the panicle.

[0127] According to a specific embodiment, the grain yield is manifested by an increase in percentage of head rice yield. The weight of head rice, expressed as a percentage of the original rough rice weight, is defined as the head rice yield (HRY) and may vary from 0, where all kernels are broken to a theoretical maximum of approximately 70% (no kernels are broken, 30% waste consisting of husk and bran). According to a specific embodiment, the grain yield is manifested by an increase in weight of filled spikelets per plant.

[0128] According to a specific embodiment, the grain yield is manifested by an increase in bulk grain weight per a predetermined number of plants.

[0129] According to a specific embodiment, the grain yield is manifested by an increase in number of panicles per plant.

[0130] According to a specific embodiment, there is an overall increase in spikelets (filled and unfilled) e.g., when superior alleles of the four central hub genes are pyramided (see FIG. 13) as compared to samples of the same genetic background without the sequence variation (e.g., the recipient plant).

[0131] According to a specific embodiment, the increase in grain yield does not compromise grain quality.

[0132] Hence grain quality in a plant comprising the sequence variation in the TPR allele is about the same as or better than that of a control plant of the same genetic background without the variation.

[0133] As shown in Example 3, there is an association of TPR (OsTPR) with increased USRB and TSP without compromising the grain quality. Additionally, analysis of grain quality traits indicated that the amylose content, gel temperature, viscosity, retrogradation, etc., and cooking traits such as the cooked grain length and width (FIG. 10), were better or maintained in the OsTPR haplotype 1 grains on USRB.

[0134] Rice grain quality is typically composed of several factors, including grain appearance and milling, storing, eating, cooking, and nutritional qualities; appearance quality is mostly determined by grain shape and endosperm opacity (or chalkiness) [Zhang Q F. Strategies for developing green super rice. Proc Natl Acad Sci USA. 2007; 104:16402-16409. doi: 10.1073/pnas.0708013104; Wan X Y, Weng J F, Zhai H Q, Wang J K, Lei C L, Liu X L, Guo T, Jiang L, Su N, Wan J M. Quantitative trait loci (QTL) analysis for rice grain width and fine mapping of an identified QTL allele gw-5 in a recombination hotspot region on Chromosome 5. Genetics. 2008; 179:2239-2252. doi: 10.1534/genetics.108.089862.].

[0135] Embodiments of the invention therefore relate to any manifestation of a grain quality. Such include but are not limited to amylose content, chalkiness, gel temperature, trough, viscosity, breakdown, raw grain shape, raw grain length, raw grain width, retrogradation, and cooking traits such as the cooked grain shape, cooked grain length or width, final viscosity, peak viscosity, pasting temperature.

[0136] According to a specific embodiment, the quality trait refers to the raw grain and is manifested by chalkiness, grain size and/or grain shape.

[0137] FIG. 10 relates to any such parameter which is envisaged in this case.

[0138] Chalk. An opaque region of the rice kernel resulting from loose packing of the starch granules. Chalk may occur throughout or in a part of the kernel.

[0139] Chalkiness is a major constraint in rice production because it is one of the key factors determining grain quality and price. Its reduction is a major goal, and the primary purpose of this study was to dissect the genetic basis of grain chalkiness.

[0140] Chalkiness parameters include chalkiness rate, white core rate, white belly rate, chalkiness area, white core area, and white belly area

[0141] According to a specific embodiment, chalk is less than 5%.

[0142] According to a specific embodiment, the chalkiness of the progeny plant is similar to that of the recipient or better (i.e., reduced chalkiness by at least 20%, 30%, 40%, 50%, 60%, 70%, 75%, 80%, 85%, 90%, 95%, as compared to the same genetic background not carrying the variation i.e., control).

[0143] As used herein “amylose content” which refers to percent apparent amylose content is typically measured by a continuous flow analyzer.

[0144] Apparent Amylose Percent. The most important grain characteristic that describes cooking behavior in each grain class, or type, i.e., long-, medium- and short-grain. The percentage of the endosperm starch of milled rice that is amylose. Standard long grains contain 20% to 23% amylose. Rexmont type long grains contain 24% to 25% amylose. Short and medium grains contain 16% to 19% amylose. Waxy rice contains 0% amylose.

[0145] According to a specific embodiment the amylose content is intermediate, i.e., 20-25%.

[0146] As used herein “gel temperature” or gel (gelatinization) temperature refers to the temperature at which rice starch granules imbibe water and lose crytallinity in an irreversible manner. It can be measured using the alkali spreading method. According to a specific embodiment, moderate gel temperature is preferred, as well known to the skilled artisan.

[0147] As used herein “viscosity” refers to the flow resistance of a rice flour suspension. It can be measured using a Rapid Visco Analyzer (RVA). According to a specific embodiment an intermediate viscosity is preferred as well known to the skilled artisan.

[0148] As used herein “retrogradation” refers to the appearance of starch clumps. Retrogradation refers to the crystallinization of amylose chains at room temperature which results to the hardening of rice after cooking. This parameter can be measured using RVA.

[0149] Grain Length (L). Length of a rice grain is measured in millimeters and can be measured using a SeedCount SC5000 Image Analyzer.

[0150] Grain Width (W). Width of a rice grain is measured in millimeters and can be measured using a SeedCount SC5000 Image Analyzer.

[0151] According to a specific embodiment the grain length and/or grain width are about the same as that of the control.

[0152] According to a specific embodiment, the grain characteristic is selected from high head rice recovery (HRR) and low chalkiness (less than 5%).

[0153] As mentioned the method involves transferring a TPR nucleic acid sequence comprising the superior allele (as an example for sequence variation) to a donor plant.

[0154] As used herein “translocated promoter region” gene or “TPR” belongs to the nuclear-pore complex that mediate the transport of RNA and other cargo between the nucleus and the cytoplasm. In Arabidopsis the protein was shown to play a role in RNA homeostasis, flowering time and auxin signaling.

[0155] The Arabidopsis thaliana homolog AtTPR (AT1G79280) is typically represented by the sequence SEQ ID NO: 9, NM_001198507, SEQ ID NO: 10 NP_178048.2, for the nucleotide and amino acid sequences, respectively. The amino acid sequence is shown in FIG. 15.

[0156] The present inventors have identified the rice homolog OsTPR, represented by the sequence SEQ ID NO: 7 NC_029257.1, SEQ ID NO: 8 XP_015625577.1, for the nucleotide and amino acid sequences, respectively. The gene is located on chromosome 2: 31009161 to 31033605 bp; minus strand. The amino acid sequence is shown in FIG. 15.

[0157] As used herein a sequence variation in a TPR allele, refers to at least one mutation that can be any of a deletion, substitution, deletion, insertion, inversion of one or more nucleotides in the OsTPR reference sequence.

[0158] The variation can be at least 90% identical, but not full identity with the OsTPR allele, in the DNA or protein level.

[0159] As used herein, “sequence identity” or “identity” in the context of two nucleic acid or polypeptide sequences includes reference to the residues in the two sequences which are the same when aligned. When percentage of sequence identity is used in reference to proteins it is recognized that residue positions which are not identical often differ by conservative amino acid substitutions, where amino acid residues are substituted for other amino acid residues with similar chemical properties (e.g. charge or hydrophobicity) and therefore do not change the functional properties of the molecule. Where sequences differ in conservative substitutions, the percent sequence identity may be adjusted upwards to correct for the conservative nature of the substitution. Sequences which differ by such conservative substitutions are considered to have “sequence similarity” or “similarity”. Means for making this adjustment are well-known to those of skill in the art. Typically this involves scoring a conservative substitution as a partial rather than a full mismatch, thereby increasing the percentage sequence identity. Thus, for example, where an identical amino acid is given a score of 1 and a non-conservative substitution is given a score of zero, a conservative substitution is given a score between zero and 1. The scoring of conservative substitutions is calculated, e.g., according to the algorithm of Henikoff S and Henikoff J G. [Amino acid substitution matrices from protein blocks. Proc. Natl. Acad. Sci. U.S.A. 1992, 89(22): 10915-9].

[0160] Identity (e.g., percent homology) can be determined using any homology comparison software, including for example, the BlastN software of the National Center of Biotechnology Information (NCBI) such as by using default parameters.

[0161] Hence according to a specific embodiment, the variation can arise from different cultivars of the species (e.g., indica to japonica) or different species.

[0162] According to some embodiments of the invention, the identity is a global identity, i.e., an identity over the entire amino acid or nucleic acid sequences of the invention and not over portions thereof.

[0163] As mentioned, this variation that may be of a single base to several hundreds or thousands of nucleotides e.g., 1-200 nucleotides confers the enhanced grain yield.

[0164] Methods of validating such variations and their effect in the phenotypes are well known in the art and described in length in the Examples section which follows.

[0165] The at least one mutation may be in the coding sequence.

[0166] Alternatively or additionally, the at least one mutation may be in the non-coding sequence.

[0167] According to a specific embodiment, the sequence variation comprises at least one single nucleotide polymorphism (SNP) selected from the group of SNPs of TPR and optionally other genes shown in Table A below.

[0168] According to a specific embodiment, the sequence variation comprises at least two single nucleotide polymorphisms (SNPs) selected from the group of SNPs of TPR and optionally other genes shown in Table A below.

[0169] According to a specific embodiment, the sequence variation comprises at least three single nucleotide polymorphisms (SNPs) selected from the group of SNPs of TPR and optionally other genes shown in Table A below.

[0170] According to a specific embodiment, the sequence variation comprises at least three single nucleotide polymorphisms (SNPs) selected from the group of SNPs of TPR and optionally other genes shown in Table A below.

[0171] According to a specific embodiment, the sequence variation comprises at least four single nucleotide polymorphisms (SNPs) selected from the group of SNPs of TPR and optionally other genes shown in Table A below.

[0172] According to a specific embodiment, the sequence variation comprises at least five single nucleotide polymorphism (SNPs) selected from the group of SNPs of TPR and optionally other genes shown in Table A below.

[0173] According to a specific embodiment, the sequence variation comprises at least six single nucleotide polymorphism (SNPs) selected from the group of SNPs of TPR and optionally other genes shown in Table A below.

[0174] According to a specific embodiment, the sequence variation comprises at least seven single nucleotide polymorphism (SNPs) selected from the group of SNPs of TPR and optionally other genes shown in Table A below.

[0175] According to a specific embodiment, the sequence variation comprises at least eight single nucleotide polymorphism (SNPs) selected from the group of SNPs of TPR and optionally other genes shown in Table A below.

[0176] According to a specific embodiment, the sequence variation comprises at least nine single nucleotide polymorphism (SNPs) selected from the group of SNPs of TPR and optionally other genes shown in Table A below.

[0177] According to a specific embodiment, the sequence variation comprises at least ten single nucleotide polymorphism (SNPs) selected from the group of SNPs of TPR and optionally other genes shown in Table A below.

[0178] According to a specific embodiment, the sequence variation comprises at least ten to 20 single nucleotide polymorphism (SNPs) selected from the group of SNPs of TPR and optionally other genes shown in Table A below.

[0179] According to a specific embodiment, the sequence variation comprises at least ten to 30 single nucleotide polymorphism (SNPs) selected from the group of SNPs of TPR and optionally other genes shown in Table A below.

[0180] According to a specific embodiment, the sequence variation comprises at least ten to 50 single nucleotide polymorphism (SNPs) selected from the group of SNPs of TPR and optionally other genes shown in Table A below.

[0181] According to a specific embodiment, the sequence variation is as set forth in haplotype I (AGGATCA, SEQ ID NO: 1).

[0182] According to a specific embodiment haplotype I and genetic variations in other genes are provided in Table A below:

TABLE A
(variation is shown in a bigger font)

| | | | | | | | | | |
|---|---|---|---|---|---|---|---|---|---|
| LOC_Os02g50790/LOC_Os02g50799 | OsTPR | snp_02_31035009 | 10231035009 | 2 | 31035009 | G | A | Variant in promoter region | — |
| LOC_Os02g50790/LOC_Os02g50799 | OsTPR | snp_02_31026954 | 10231026954 | 2 | 31026954 | C | G | Missense variant | Glu > Gln |
| LOC_Os02g50790/LOC_Os02g50799 | OsTPR | snp_02_31024549 | 10231024549 | 2 | 31024549 | C | T | Missense variant and splice | Glu > Lys |
| | | | | | | | | region variant | |
| LOC_Os02g50790/LOC_Os02g50799 | OsTPR | snp_02_31023080 | 10231023080 | 2 | 31023080 | A | T | Missense variant | Leu > Met |
| LOC_Os02g50790/LOC_Os02g50799 | OsTPR | snp_02_31019010 | 10231019010 | 2 | 31019010 | T | G | Missense variant | Gln > His |
| LOC_Os02g50790/LOC_Os02g50799 | OsTPR | snp_02_31013745 | 10231013745 | 2 | 31013745 | A | G | Missense variant | Val > Ala |
| LOC_Os02g50790/LOC_Os02g50799 | OsTPR | snp_02_31010249 | 10231010249 | 2 | 31010249 | T | A | Missense variant | Met > Leu |
| LOC_Os04g39430 | D11 | snp_04_23472273 | 10423472273 | 4 | 23472273 | G | A | Variant in promoter region | — |
| LOC_Os04g39430 | D11 | snp_04_23472700 | 10423472700 | 4 | 23472700 | G | A | Variant in promoter | — |
| LOC_Os04g39430 | D11 | snp_04_23472861 | 10423472861 | 4 | 23472861 | C | T | Variant in promoter | — |
| LOC_Os06g40780 | MOC1 | snp_06_24312857 | 10624312857 | 6 | 24312857 | G | C | Synonymous variant | — |
| LOC_Os06g40780 | MOC1 | snp_06_24313378 | 10624313378 | 6 | 24313378 | A | G | Intronic variant | — |
| LOC_Os11g35390 | MYB4P | snp_11_20737146 | 11120737146 | 11 | 20737146 | A | G | Synonymous variant | — |

[0183] Thus, the SNP can be located in an intron, a regulatory (e.g., promoter), and/or a coding region.

[0184] FIG. 3 shows exemplary locations of the SNPs which may build a superior haplotype such as haplotype I.

[0185] The at least one mutation can be in a functional domain. An example of a functional domain may be a promoter, a TPR domain, a binding region for SPL3/SPL14.

[0186] Exemplary SNPs include, but are not limited to:

[0187] snp_02_31010249, snp_02_31013745, snp_02_31019010 (SNP within the TPR domain), snp_02_31023080, snp_02_31024549, snp_02_31026954, snp_02_31035009 (SNP in promoter region).

[0188] As used herein “haplotype” relates to a set of SNP alleles that tend to always occur together (i.e., that are associated statistically).

[0189] The at least one mutation can be in a structural domain of the DNA, RNA or protein.

[0190] Haplotype and gene structure in FIG. 3, in connection with Table A. Since the OsTPR gene is in minus strand, the haplotype (3′ to 5′) is a reverse of the gene structure (5′ to 3′) presented. Given this, the sequence of SNPs (from left to right) in the haplotype is as follows: snp_02_31010249 (T/A), snp_02_31013745 (A/G), snp_02_31019010 (T/G; SNP in TPR domain), snp_02_31023080 (A/T), snp_02_31024549 (C/T), snp_02_31026954 (C/G), snp_02_31035009 (G/A; upstream SNP; colored as orange). But this sequence is reversedly presented in the gene structure which shows snp_02_31035009 (G/A; upstream SNP) as the first SNP (leftmost) and snp_02_31010249 (T/A) as the last SNP (rightmost).

[0191] Now the superior haplotype, AGGATCA, is a mixture of both reference and alternative alleles. Here, the alleles in bold (A and C) are from the reference while the ones not in bold are alternative alleles. The underlined allele (T) is an alternative allele which refers to the SNP which has both a missense and splice variant annotation (snp_02_31024549). The r-square values of snp_02_31024549 with the neighboring reference alleles, snp_02_31023080 and snp_02_31026954, are 0.623 and 0.564, respectively. Most of the seven SNPs have high D′ (0.986 to 1.0) but the r-square values are variable (0.56 to 0.986).

[0192] Motif connection with haplotype SPL3/SPL14 in Arabidopsis bind specifically to the consensus nucleotide sequence 5′-TNCGTACAA-3′. For motif searching, the input sequence consists of a stretch of 31 bp, having the upstream SNP, snp_02_31035009 (G/A), in the middle (15th SNP) and is reverse transcribed for the software used. Snp_02_31035009 overlaps with the eighth position of the motif (5′-TNCGTACAA-3′) having either T(A) for lines with high USRB (HUSRB) or C(G) for lines with low USRB (LUSRB). The alleles in parentheses are the reverse complement of the nucleotides in the genomic sequence. These alleles are colored in orange in the haplotype sequence, with A for HUSRB lines and G for LUSRB lines.

[0193] As used herein a “donor plant” which may also be referred to as a “non-recurrent parent” comprises the variation in the TPR gene.

[0194] According to a specific embodiment, Samba Mahsuri is a donor plant.

[0195] As used herein “a recipient plant” which may also be referred to as a “recurrent parent” refers to a cultivar e.g., an elite line, that could be made better (e. in terms of yield) by adding sequence variation.

[0196] The recipient plant may not comprise the variation at all, accordingly the recipient plant is null for said sequence variation, e.g., haplotype I.

[0197] According to other embodiments, the recipient plant may comprise a single allele or more but not all alleles which comprise the variation, in such a case the plant is heterozygous for the variation. In certain case, such a plant may be simply subjected to selfing to render it homozygous for the variation.

[0198] Accordingly, the recipient plant is heterozygous for the sequence variation e.g., haplotype I.

[0199] As mentioned, once progeny plants are selected for the trait, the progeny may be crossed to the recurrent parent (it is ‘crossed back’ to the recurrent parent, hence the term backcross). The progeny of this cross is selected for the trait of interest and then crossed back to the recurrent parent. This process is repeated for as many backcrosses as are needed to create a line that is the recurrent parent with the sequence variation from the donor parent. The goal of backcrossing is to obtain a line as identical as possible to the recurrent parent with the addition of the sequence variation that has been added through breeding.

[0200] According to an embodiment of the invention, the recipient rice plant may comprise a genetic background that comprises a sequence variation in a gene selected from the group consisting of D11, MOC1 and MYB4P (D11, MOC1, MYB4P, D11+MOC1, D11+MYB4P, MOC1+MYB4P, D11+MYB4P+MOC1). The present inventor identified a superior phenotype in terms of yield when variations in any of these genes were added to the TPR allele variation (see FIG. 6). DWARF11 encodes cytochrome P450 superfamily protein involved in brassinosteroid biosynthesis. Transgenic plants manipulated for His360Leu amino acid substitution were shown to confer clustered primary branch in rice (Wu, Y., Fu, Y., Zhao, S., Gu, P., Zhu, Z., Sun, C., Tan, L. 2016. CLUSTERED PRIMARY BRANCH 1, a new allele of DWARF11, controls panicle architecture and seed size in rice. Plant Biotech. J. 14:377-386. doi: 10.1111/pbi.12391. DWARF11 mutation leads to reduced rachis length, decreased grain number, and secondary rachis branches. Overexpression of DWARF11 leads to an increase in total grain number and thus yield enhancement by 16% (Zhou, Y., Tao, Y., Zhu, J., Miao, J., Liu, J., Liu, Y., Yi, C., Yang, Z., Gong, Z., Liang, G. 2017. GNS4, a novel allele of DWARF11, regulates grain number and grain size in a high-yield rice variety. Rice. 10(34):1-11. DOI 10.1186/s12284-017-0171-4. An exemplary sequence is provided in SEQ ID NO: 11 or 12.

[0201] MOC1 encodes a GRAS family transcription regulator which controls tillering, number of rachis branches, and spikelets in rice (Li, X., Qian, Q., Fu, Z., Wang, Y., Xiong, G., Zeng, D., Wang, X., Liu, X., Teng, S., Hiroshi, F., Yuan, M., Luo, D., Han, B., Li, J. 2003. Control of tillering in rice. Nature. 422: 618-621. DOI:10.1038/nature01518). An exemplary sequence is provided in SEQ ID NO: 13 or 14.

[0202] MYB4P encodes an R2R3 MYB family transcription factor which plays a role in cell differentiation, abiotic response, and phosphate acquisition (www(dot)uniprot(dot)org/uniprot/Q2R2L6; www(dot)ncbi(dot)nlm(dot)nih(dot)gov/pubmed/24813725) Yang, W. T., Baek, D., Yun, D. J., Hwang, W. H., Park, D. S., Nam, M. H., Chung, E. S., Chung, Y. S., Yi, Y. B., Kim, D. H. 2014. Overexpression of OsMYB4P, an R2R3-type MYB transcriptional activator, increases phosphate acquisition in rice. Plant Physiol Biochem. 80:259-67. doi: 10.1016/j.plaphy.2014.02.024. An exemplary sequence is provided in SEQ ID NO: 15 or 16.

[0203] According to a specific embodiment the recipient rice plant is of a variety comprising a sequence variation in a gene selected from the group consisting of D11, MOC1, and MYB4P.

[0204] According to a specific embodiment the method further comprises breeding the recipient plant, donor plant or progeny plant to comprise a sequence variation in a gene selected from the group consisting of D11, MOC1, and MYB4P.

[0205] According to a specific embodiment the recipient plant or said progeny comprises a sequence variation in a gene selected from the group consisting of D11, MOC1, and MYB4P is shown in FIG. 6.

[0206] Such genetic backgrounds are available in the IRIS series shown in FIG. 6.

[0207] Exemplary haplotypes are shown in Table A above.

[0208] Other sequence variations are described in FIG. 17.

[0209] According to an additional or an alternative embodiment, the recipient plant is characterized by high amylose content (e.g., comprising a sequence variation which reduces expression of a starch branching enzyme IIb (sbeIIb, e.g., LOC_Os02g32660)), and optionally a sequence variation in MOC1. Such an exemplary line is IR36ae. According to a specific embodiment, the cross is between Samba Masuri and IR36ae (see FIG. 18).

[0210] Numerous ways are known in the art for crossing Gramineae plants or species thereof. The following refers to rice but in a non-limiting manner such that it can encompass other Gramineae or crosses therebetween (interspecific crossing).

[0211] Thus, according to one embodiment, for producing a rice plant with improved yield, protoplast fusion can be used for the transfer of nucleic acids from a donor plant to a recipient plant. Protoplast fusion is an induced or spontaneous union, such as a somatic hybridization, between two or more protoplasts (cells of which the cell walls are removed by enzymatic treatment) to produce a single bi- or multi-nucleate cell. The fused cell, that may even be obtained with plant species that cannot be interbred in nature, is tissue cultured into a hybrid plant exhibiting the desirable combination of traits. More specifically, a first protoplast can be obtained from a rice plant or other plant line that exhibits improved grain yield. For example, a protoplast from a superior Indica line e.g., IR64. A second protoplast can be obtained from rice or other plant variety, preferably a popular Japonica rice cultivar e.g., Nipponbare. Additionally, the second protoplast may be from a rice variety that comprises commercially desirable characteristics, such as, but not limited to disease resistance, insect resistance, weed resistance, etc. The protoplasts are then fused using traditional protoplast fusion procedures, which are known in the art.

[0212] Alternatively, embryo rescue may be employed in the transfer of a nucleic acid comprising the TPR variation as described above from a donor plant to a recipient plant. Embryo rescue can be used as a procedure to isolate embryos from crosses wherein plants fail to produce viable seed. In this process, the fertilized ovary or immature seed of a plant is tissue cultured to create new plants.

[0213] Traditional breeding techniques can also be used to introgress a nucleic acid sequence of the variation in the TPR allele into a recipient rice plant in which a higher grain yield is desirable. In one method, related to pedigree breeding, a donor rice plant comprising a nucleic acid sequence variation as discussed is crossed with a rice plant in which a higher grain yield is desirable. The resulting plant population (representing the F1 hybrids) is then self-pollinated and set seeds (F2 seeds). The F2 plants grown from the F2 seeds are then screened for improved grain yield and optionally grain quality. The population can be screened or selected for improved grain yield in a number of different ways. For example, the population can be screened by field evaluation over several seasons.

[0214] An embodiment relates to a rice plant having improved grain yield, or part thereof, comprising within its genome the TPR variation, wherein the variation is not in its natural genetic background. The rice plants having improved grain yield described herein can be of any genetic type such as inbred, hybrid, haploid, dihaploid. Further, the plants of the present invention may be heterozygous or homozygous for the variation. As mentioned, although the TPR variation may be transferred to any rice plant in order to provide for a plant having improved grain yield, the methods and plants described herein are related to Gramineae family.

[0215] Inbred rice lines having improved grain yield can be developed using the techniques of recurrent selection and backcrossing, selfing and/or dihaploids or any other technique used to make parental lines. In a method of selection and backcrossing, improved grain yield can be introgressed into the recipient plant (which as mentioned is also termed “a recurrent parent”) by crossing the recurrent parent with a first donor plant (which is different from the recurrent parent and referred to herein as the “non-recurrent parent”). The recurrent parent is a plant in which an increase in grain yield is desirable. Optionally, the recurrent parent possesses commercially desirable characteristics, such as, but not limited to disease resistance, insect resistance, weed resistance, etc. The non-recurrent parent comprises a nucleic acid sequence with the TPR sequence variation. The non-recurrent parent can be any plant variety or inbred line that is cross-fertile with the recurrent parent (or fertilization may be aided by means which are well known in the art). The progeny resulting from a cross between the recurrent parent and non-recurrent parent are backcrossed to the recurrent parent. The resulting plant population is then screened (also termed here as “selected”). The population can be screened in a number of different ways. F1 hybrid plants that exhibit improved grain yield and comprise the requisite nucleic acid sequence for the variation are then selected and selfed and selected for over a number of generations in order to allow for the rice plant to become increasingly inbred. This process of continued selfing and selection can be performed for zero to five or more generations. The result of such breeding and selection is the production of lines that are genetically homogenous for the variation associated with improved grain yield as well as other genes associated with traits of commercial interest.

[0216] Instead of using phenotypic screens, marker assisted selection (MAS) can be performed using one or more of the herein described molecular markers (e.g., for haplotype I), hybridization probes, or polynucleotides to identify those progeny that comprise the nucleic acid variation. The MAS is used for by identifying said variation.

[0217] Molecular markers can include restriction fragment length polymorphisms (RFLP), random amplified polymorphic DNA (RAPD), amplified fragment length polymorphisms (AFLP), single nucleotide polymorphisms (SNP) or simple sequence repeats (SSR). A primary motivation for development of molecular markers in crop species is the potential for increased efficiency in plant breeding through marker assisted selection (MAS) and marker assisted backcrossing (MABC). Genetic marker alleles are used to identify plants that contain a desired genotype at one or more loci and that are expected to transfer the desired genotype, along with a desired phenotype to their progeny. Genetic marker alleles can be used to identify plants that contain a desired genotype at one locus or at several unlinked or linked loci (e.g., a haplotype) and that would be expected to transfer the desired genotype, along with a desired phenotype to their progeny.

[0218] After a desired phenotype, e.g., improved grain yield and a polymorphic chromosomal locus are determined to segregate together, it is possible to use those polymorphic loci to select for alleles corresponding to the desired phenotype: a process called marker-assisted selection (MAS). In brief, a nucleic acid corresponding to the marker nucleic acid is detected in a biological sample from a plant to be selected. This detection can take the form of hybridization of a probe nucleic acid to a marker, e.g., using allele-specific hybridization, Southern analysis, northern analysis, in situ hybridization, hybridization of primers followed by PCR amplification of a region of the marker, or the like. A variety of procedures for detecting markers are described herein. After the presence (or absence) of a particular marker and/or marker allele in the biological sample is verified, the plant is selected, i.e., used to make progeny plants by selective breeding.

[0219] Screening a large number of plants for improved grain yield can be expensive, time consuming and unreliable. Use of the genetically-linked nucleic acids described herein as genetic markers for improved grain yield is an effective method for selecting plants capable of fertility restoration in breeding programs. For example, one advantage of marker-assisted selection over field evaluations for improved grain yield is that MAS can be done at any time of year regardless of the growing season. Moreover, environmental effects are irrelevant to MAS.

[0220] Another use of MAS in plant breeding is to assist the recovery of the recurrent parent genotype by backcross breeding. Backcross breeding is the process of crossing a progeny back to one of its parents. Backcrossing is usually done for the purpose of introgressing one or a few loci from a donor parent into an otherwise desirable genetic background from the recurrent parent. The more cycles of backcrossing that are done, the greater the genetic contribution of the recurrent parent to the resulting variety. This is often necessary, because donor parent plants may be otherwise undesirable. In contrast, varieties which are the result of intensive breeding programs may merely being deficient in one desired trait such as improved grain yield. Backcrossing can be done to select for or against a trait.

[0221] Markers corresponding to genetic polymorphisms between members of a population can be detected by numerous methods, well-established in the art (e.g., restriction fragment length polymorphisms, isozyme markers, allele specific hybridization (ASH), amplified variable sequences of the plant genome, self-sustained sequence replication, simple sequence repeat (SSR), single nucleotide polymorphism (SNP) or amplified fragment length polymorphisms (AFLP)).

[0222] The majority of genetic markers rely on one or more properties of nucleic acids for their detection. For example, some techniques for detecting genetic markers utilize hybridization of a probe nucleic acid to nucleic acids corresponding to the genetic marker. Hybridization formats include but are not limited to, solution phase, solid phase, mixed phase or in situ hybridization assays. Markers which are restriction fragment length polymorphisms (RFLP), are detected by hybridizing a probe (which is typically a sub-fragment or a synthetic oligonucleotide corresponding to a sub-fragment of the nucleic acid to be detected) to restriction digested genomic DNA. The restriction enzyme is selected to provide restriction fragments of at least two alternative (or polymorphic) lengths in different individuals and will often vary from line to line. Determining a (one or more) restriction enzyme that produces informative fragments for each cross is a simple procedure, well known in the art. After separation by length in an appropriate matrix (e.g., agarose) and transfer to a membrane (e.g., nitrocellulose, nylon), the labeled probe is hybridized under conditions which result in equilibrium binding of the probe to the target followed by removal of excess probe by washing. Nucleic acid probes to the marker loci can be cloned and/or synthesized. Detectable labels suitable for use with nucleic acid probes include any composition detectable by spectroscopic, radioisotopic, photochemical, biochemical, immunochemical, electrical, optical or chemical means. Useful labels include biotin for staining with labeled streptavidin conjugate, magnetic beads, fluorescent dyes, radiolabels, enzymes and colorimetric labels. Other labels include ligands which bind to antibodies labeled with fluorophores, chemiluminescent agents and enzymes. Labeling markers is readily achieved such as by the use of labeled PCR primers to marker loci.

[0223] The hybridized probe is then detected using, most typically, autoradiography or other similar detection technique (e.g., fluorography, liquid scintillation counter, etc.). Examples of specific hybridization protocols are widely available in the art.

[0224] Amplified variable sequences refer to amplified sequences of the plant genome which exhibit high nucleic acid residue variability between members of the same species. All organisms have variable genomic sequences and each organism (with the exception of a clone) has a different set of variable sequences. Once identified, the presence of specific variable sequence can be used to predict phenotypic traits. Preferably, DNA from the plant serves as a template for amplification with primers that flank a variable sequence of DNA. The variable sequence is amplified and then sequenced.

[0225] In vitro amplification techniques are well known in the art. Examples of techniques include in vitro methods, including the polymerase chain reaction (PCR), the ligase chain reaction (LCR), O,.beta.-replicase amplification and other RNA polymerase mediated techniques (e.g., NASBA). Essentially any RNA can be converted into a double stranded DNA suitable for restriction digestion, PCR expansion and sequencing using reverse transcriptase and a polymerase.

[0226] Oligonucleotides for use as primers, e.g., in amplification reactions and for use as nucleic acid sequence probes, are typically synthesized chemically according to the solid phase phosphoramidite triester method, or can simply be ordered commercially.

[0227] Alternatively, self-sustained sequence replication can be used to identify genetic markers. Self-sustained sequence replication refers to a method of nucleic acid amplification using target nucleic acid sequences which are replicated exponentially in vitro under substantially isothermal conditions by using three enzymatic activities involved in retroviral replication: (1) reverse transcriptase, (2) Rnase H and (3) a DNA-dependent RNA polymerase. By mimicking the retroviral strategy of RNA replication by means of cDNA intermediates, this reaction accumulates cDNA and RNA copies of the original target.

[0228] There are many different types of molecular markers, including amplified fragment length polymorphisms (AFLP), allele-specific hybridization (ASH), single nucleotide polymorphisms (SNP), simple sequence repeats (SSR) and isozyme markers. SSR data is generated by hybridizing primers to conserved regions of the plant genome which flank the SSR sequence. PCR is then used to amplify the repeats between the primers. The amplified sequences are then electrophoresed to determine the size and therefore the di-, tri and tetra nucleotide repeats.

[0229] The presence of the variation in the genome of a plant exhibiting a preferred phenotypic trait is determined by any method listed above, e.g., RFLP, AFLP, SSR, etc. If the nucleic acids from the plant are positive for a desired genetic marker, the plant can be selfed to create a true breeding line with the same genotype or it can be crossed with a plant with the same marker or with other desired characteristics to create a sexually crossed hybrid generation.

[0230] As mentioned, selection can be also or alternatively based on phenotypic screening for a grain yield- and/or grain quality-associated trait, such as described above.

[0231] Once the appropriate selections are made, the process is repeated. The process of backcrossing to the recurrent parent and selecting for improved grain yield (or the variation or both) is repeated for approximately 2-5 or more generations. The progeny resulting from this process are heterozygous for the variation. The last backcross generation can then be selfed in order to provide for homozygous pure breeding progeny for improved grain yield.

[0232] The rice lines having improved grain yield described herein can be used in additional crossings to create hybrid plants having improved grain yield. For example, a first inbred rice plant having improved grain yield produced by methods described herein can be crossed with a second inbred rice plant possessing commercially desirable traits such as, but not limited to, disease resistance, insect resistance, weed resistance, etc. This second inbred rice line may or may not have relatively improved grain yield.

[0233] Regardless of the selection method, following trait selection and backcrossing the genome of the cultivated Gramineae plant e.g., rice plant of the recurrent parent is recovered to at least 85%, at least 87%, at least 90%, at least 92%, at least 94%, at least 96%, or at least 98%. That is, the plant of the invention has a genome being at least 85%, e.g., 85-99.9% that of the recurrent parent e.g., Oryza sativa.

[0234] Also provided are such methods, wherein the recovery of the recurrent rice plant's genome (e.g., Oryza sativa) is between 92% and 97%.

[0235] A rice plant having improved grain yield, or a part thereof, or an elite line obtainable by a method described herein is also an embodiment of the present invention.

[0236] According to an embodiment, the plant is not Samba Mahsuri.

[0237] According to a specific embodiment, the plant is not a breeding line.

[0238] According to a specific embodiment, the plant is not any of the below lines:

### IRRI179

### IR30

### IR34

### IRRI135

### IRRI127

### IR64

### IRRI174

### IRRI168

### IRRI108

### IRRI123

### IRRI156

[0239] Also contemplated is an elite line of a Gramineae plant comprising a sequence variation in a TPR allele or a haplotype I, the plant being characterized by an improved grain yield as compared to a control plant (excluded are the lines described above).

[0240] Also provided are processed rice products which are produced from the plants described herein and preferably contain the nucleic acid sequence conferring the improved out-crossing rate described herein. Also provided are methods of processing the rice (e.g., to produce meal) or other processed products.

[0241] Food Characteristics:

[0242] Rice starch is a major source of carbohydrate in the human diet, particularly in Asia, and the grain of the invention and products derived from it can be used to prepare food. The food may be consumed by man or animals, for example in livestock production or in pet-food. The grain derived from the rice plant can readily be used in food processing procedures, and therefore the invention includes milled, ground, kibbled, cracked, rolled, boiled or parboiled grain, or products obtained from the processed or whole grain of the rice plant, including flour, brokers, rice bran and oil. The products may be precooked or quick-cooking rice, instant rice, granulated rice, gelatinized rice, canned rice or rice pudding. The grain or starch may be used in the production of processed rice products including noodles, rice cakes, rice paper or egg roll wrapper, or in fermented products such as fermented noodle or beverages such as sake. The grain or starch derived therefrom may also be used in, for example, breads, cakes, crackers, biscuits and the like, including where the rice flour is mixed with wheat or other flours, or food additives such as thickeners or binding agents, or to make drinks, noodles, pasta or quick soups. The rice products may be suitable for use in wheatfree diets. The grain or products derived from the grain of the invention may be used in breakfast cereals such as puffed rice, rice flakes or as extruded products.

[0243] Dietary Fiber:

[0244] Dietary fiber, in this specification, is the carbohydrate and carbohydrate digestion products that are not absorbed in the small intestine of healthy humans but enter the large bowel. This includes resistant starch and other soluble and insoluble carbohydrate polymers. It is intended to comprise that portion of carbohydrates that are fermentable, at least partially, in the large bowel by the resident microflora.

[0245] Non-Food Applications:

[0246] Rice is widely used in non-food industries, including the film, paper, textile, corrugating and adhesive industries, for example as a sizing agent. Rice starch may be used as a substrate for the production of glucose syrups or for ethanol production.

[0247] DNA detection in the processed products can be performed using methods which are well known in the art and are described in some detail hereinabove.

[0248] It will be appreciated that the present teachings contemplate the protection of cultivated Gramineae plants such as cultivated rice plants and will not in any way encompass wild Gramineae per se.

[0249] Applicant notes that all varieties designated IRIS are not restricted for use and can be provided by Applicant to 3^{rd} party for research purposes under a Standard Material Transfer Agreement (“SMTA”).

[0250] It is expected that during the life of a patent maturing from this application many relevant markers will be developed and the scope of the term marker is intended to include all such new technologies a priori.

[0251] As used herein the term “about” refers to ±10%.

[0252] The terms “comprises”, “comprising”, “includes”, “including”, “having” and their conjugates mean “including but not limited to”.

[0253] The term “consisting of” means “including and limited to”.

[0254] The term “consisting essentially of” means that the composition, method or structure may include additional ingredients, steps and/or parts, but only if the additional ingredients, steps and/or parts do not materially alter the basic and novel characteristics of the claimed composition, method or structure.

[0255] As used herein, the singular form “a”, “an” and “the” include plural references unless the context clearly dictates otherwise. For example, the term “a compound” or “at least one compound” may include a plurality of compounds, including mixtures thereof.

[0256] Throughout this application, various embodiments of this invention may be presented in a range format. It should be understood that the description in range format is merely for convenience and brevity and should not be construed as an inflexible limitation on the scope of the invention. Accordingly, the description of a range should be considered to have specifically disclosed all the possible subranges as well as individual numerical values within that range. For example, description of a range such as from 1 to 6 should be considered to have specifically disclosed subranges such as from 1 to 3, from 1 to 4, from 1 to 5, from 2 to 4, from 2 to 6, from 3 to 6 etc., as well as individual numbers within that range, for example, 1, 2, 3, 4, 5, and 6. This applies regardless of the breadth of the range.

[0257] Whenever a numerical range is indicated herein, it is meant to include any cited numeral (fractional or integral) within the indicated range. The phrases “ranging/ranges between” a first indicate number and a second indicate number and “ranging/ranges from” a first indicate number “to” a second indicate number are used herein interchangeably and are meant to include the first and second indicated numbers and all the fractional and integral numerals therebetween.

[0258] As used herein the term “method” refers to manners, means, techniques and procedures for accomplishing a given task including, but not limited to, those manners, means, techniques and procedures either known to, or readily developed from known manners, means, techniques and procedures by practitioners of the chemical, pharmacological, biological, biochemical and medical arts.

[0259] When reference is made to particular sequence listings, such reference is to be understood to also encompass sequences that substantially correspond to its complementary sequence as including minor sequence variations, resulting from, e.g., sequencing errors, cloning errors, or other alterations resulting in base substitution, base deletion or base addition, provided that the frequency of such variations is less than 1 in 50 nucleotides, alternatively, less than 1 in 100 nucleotides, alternatively, less than 1 in 200 nucleotides, alternatively, less than 1 in 500 nucleotides, alternatively, less than 1 in 1000 nucleotides, alternatively, less than 1 in 5,000 nucleotides, alternatively, less than 1 in 10,000 nucleotides.

[0260] It is appreciated that certain features of the invention, which are, for clarity, described in the context of separate embodiments, may also be provided in combination in a single embodiment. Conversely, various features of the invention, which are, for brevity, described in the context of a single embodiment, may also be provided separately or in any suitable subcombination or as suitable in any other described embodiment of the invention. Certain features described in the context of various embodiments are not to be considered essential features of those embodiments, unless the embodiment is inoperative without those elements.

[0261] Various embodiments and aspects of the present invention as delineated hereinabove and as claimed in the claims section below find experimental support in the following examples.

### EXAMPLES

[0262] Reference is now made to the following examples, which together with the above descriptions illustrate some embodiments of the invention in a non limiting fashion.

[0263] Generally, the nomenclature used herein and the laboratory procedures utilized in the present invention include molecular, biochemical, microbiological and recombinant DNA techniques. Such techniques are thoroughly explained in the literature. See, for example, “Molecular Cloning: A laboratory Manual” Sambrook et al., (1989); “Current Protocols in Molecular Biology” Volumes I-III Ausubel, R. M., ed. (1994); Ausubel et al., “Current Protocols in Molecular Biology”, John Wiley and Sons, Baltimore, Md. (1989); Perbal, “A Practical Guide to Molecular Cloning”, John Wiley & Sons, New York (1988); Watson et al., “Recombinant DNA”, Scientific American Books, New York; Birren et al. (eds) “Genome Analysis: A Laboratory Manual Series”, Vols. 1-4, Cold Spring Harbor Laboratory Press, New York (1998); methodologies as set forth in U.S. Pat. Nos. 4,666,828; 4,683,202; 4,801,531; 5,192,659 and 5,272,057; “Cell Biology: A Laboratory Handbook”, Volumes I-III Cellis, J. E., ed. (1994); “Culture of Animal Cells—A Manual of Basic Technique” by Freshney, Wiley-Liss, N. Y. (1994), Third Edition; “Current Protocols in Immunology” Volumes I-III Coligan J. E., ed. (1994); Stites et al. (eds), “Basic and Clinical Immunology” (8th Edition), Appleton & Lange, Norwalk, Conn. (1994); Mishell and Shiigi (eds), “Selected Methods in Cellular Immunology”, W. H. Freeman and Co., New York (1980); available immunoassays are extensively described in the patent and scientific literature, see, for example, U.S. Pat. Nos. 3,791,932; 3,839,153; 3,850,752; 3,850,578; 3,853,987; 3,867,517; 3,879,262; 3,901,654; 3,935,074; 3,984,533; 3,996,345; 4,034,074; 4,098,876; 4,879,219; 5,011,771 and 5,281,521; “Oligonucleotide Synthesis” Gait, M. J., ed. (1984); “Nucleic Acid Hybridization” Hames, B. D., and Higgins S. J., eds. (1985); “Transcription and Translation” Hames, B. D., and Higgins S. J., eds. (1984); “Animal Cell Culture” Freshney, R. I., ed. (1986); “Immobilized Cells and Enzymes” IRL Press, (1986); “A Practical Guide to Molecular Cloning” Perbal, B., (1984) and “Methods in Enzymology” Vol. 1-317, Academic Press; “PCR Protocols: A Guide To Methods And Applications”, Academic Press, San Diego, Calif. (1990); Marshak et al., “Strategies for Protein Purification and Characterization—A Laboratory Course Manual” CSHL Press (1996); all of which are incorporated by reference as if fully set forth herein. Other general references are provided throughout this document. The procedures therein are believed to be well known in the art and are provided for the convenience of the reader. All the information contained therein is incorporated herein by reference.

### Methods

[0264] Phenotype Data Measurement and Transformation

[0265] A total of 310 diverse resequenced indica rice accessions grown in the experimental station of the International Rice Research (IRRI), Laguna, Philippines (14° N, 121° E) during the 2015 dry season was harvested before full grain ripening, and then phenotyped using Panicle Traits Phenotyping (P-TraP) Tool (Al-Tam et al. 2013). The phenotype values were transformed using WarpedLMM (Fusi et al. 2014), a transformation tool which ensures Gaussian distribution of residuals by incorporating all available covariates and genotype profile (i.e. individual genetic loci and polygenic genetic background) of each accession in order to increase GWAS power in identifying important genomic regions and increase the accuracy in estimating heritability and predicting phenotypic values.

[0266] Genotype Data Filtering

[0267] Genotype data consisting of 15,099,561 bi-allelic SNPs from The 3,000 Genomes Rice Project was filtered for the 310 resequenced indica accessions using PLINK 1.9 (Chang et al. 2015). Markers with missing call rate more than 0.20% were excluded, followed by samples with missing call rate more than 0.20%. Moreover, variants with minor allele frequency less than 10% were filtered out to include only common variants and to control false-positive results (Tabangin et al., 2009). A total of 747,087 high quality SNPs were retained from 309 samples after filtering.

[0268] Single Locus GWAS Analysis

[0269] The marker-based Balding-Nichols kinship matrix was calculated through the Efficient Mixed-Model Association eXpedited (EMMAX) ver. Beta (Kang et al. 2010) using the emmax-kin function. The kinship matrix was considered as covariate while the SNPs were treated as fixed effects for the variance component linear mixed model implemented in EMMAX. The EMMAX associations between the filtered genotype data and transformed phenotype data for each trait were then computed. Manhattan and QQ plots were created using R (ver. 1.0.153) (R Core Team, 2018) in order to visualize the significant genomic regions and assess the reliability of the EMMAX associations, respectively. The red line represents the Bonferroni threshold (7.17) which assumes independence among all the tests (Tabangin et al., 2009). However, this correction method is extremely stringent and renders high rate of false negative results; hence, it reduces true discovery rate. In this study, SNPs with q-value less than 0.05 were considered to be significant in order to increase the discovery rate and control the rate of false positive results (Lin and Lee, 2015). The blue line in the Manhattan plot represents the SNP with the highest significant p-value whose q-value is still less than 0.05. All SNPs within the red and blue lines in the Manhattan plot were considered to be significant.

[0270] PLINK 1.9 (Chang et al. 2015) software and HaploView (Barrett et al., 2005) software were used to define haplotype blocks with regions inherited without significant recombination in the diversity population. Haplotype blocks were determined using the blocks function in PLINK 1.9. HaploView was used to determine tag SNPs based on LD coefficient (D′≥0.80). The tag SNPs per block and the haplotype groups formed therewith were further visualized in boxplots for USRB.

[0271] Gene-Level and Gene-Set Analyses

[0272] Gene and gene-set analysis were performed using Multi-marker Analysis of GenoMic Annotation (MAGMA) ver. 1.06 in order to simultaneously determine the joint effect of multiple markers (de Leeuw et al. 2015). All significant SNPs previously identified from GWAS results were mapped to genes from the Rice Genome Annotation Project (MSU v7) based on genomic location (Kawahara et al. 2013). The SNP-wise mean model was used in MAGMA for the gene-level analysis, incorporating the p-values of SNPs computed from EMMAX and the filtered genotype data to estimate the LD between SNPs. After computing for the correlations between neighbouring genes and other gene-level metrics, competitive gene-set analysis was implemented as a linear regression model in order to test whether or not the mean association of the genes in the gene-set would be greater than that of the genes not in the gene-set. This approach used to create different sets of genes by removing one gene from the set of the top ten genes based on p-value for every gene-set.

[0273] Multi-Locus GWAS Analysis

[0274] Multi-locus GWAS was performed using Multi-Locus Random-SNP-Effect Mixed Linear Model (mrMLM) function in R, as described in Misra et al. (2018). Inputs were transformed phenotype data, filtered genotype data, and kinship matrix for each panicle trait: TSP, DSP, BRSB, DSBRB, MRSB, DMSRB, USRB, DUSRB, TSRB, and TPRB. The SNP data used in slGWAS was re-coded into ped and map files using recode function in PLINK 1.9, and then converted into diploid hapmap file using TASSELS (Bradbury et al., 2007). The methods implemented were mrMLM and FAST multi-locus random-SNP-effect EMMA (FASTrEMMA) considering a critical LOD score equals 3 for significant quantitative trait nucleotide (QTN), a search radius of 20 to identify potentially associated QTN, and restricted maximum likelihood (REML) for the likelihood parameter in FASTrEMMA. The QTNs identified with mlGWAS methods were validated by slGWAS results.

[0275] Targeted Association Analysis

[0276] Biallelic SNPs within 2 kb upstream and 1 kb downstream of known panicle-related genes were extracted by aligning resequencing data of 309 accessions against reference genome Nipponbare and tested its association with TSP, TPRB, TSRB and sub-component traits (USRB, MSRB, BSRB). SNPs with p-values <0.05 were considered significant and used to form haplotype groups. Pairwise comparison of haplotype groups were performed with t-test and p-values were adjusted using Holm's method. Results were visualized using boxplots created using the ggplot2 package (Wickham, 2016) in R.

[0277] Association Networks of Genetic Variants Identified Through mlGWAS and Targeted Association

[0278] The Cytoscape (Shannon et al., 2003) has been used to visualize the inter-relationship of SNPs associated to USRB, MSRB, BSRB, TSRB, TPRB and TSP traits. The SNPs with LOD score of 3.0 or above identified using mlGWAS with significant beta values (p<0.05) obtained from slGWAS and SNPs identified for known panicle architecture related genes through targeted association with significant beta values (p<0.05) has been merged together and transform as network input file (Source node:Traits,Target nodes-SNPs,Interaction-b values). Each trait has been grouped separately and shown as big circle nodes with distinct colors. The SNPs associated with each and across traits has been shown as out-degree edges highlighted in blue (multi locus) and red color (targeted association) with solid circles at each node.

[0279] Coexpression Network Analysis

[0280] The publicly available microarray data (GSE19024 and GSE41556) were extracted as CEL files from the six panicle developmental stages [Panicle1 (less than 1 mm), Panicle2 (3-5 mm), Panicle3 (10-15 mm) including three biological replicates, Panicle4 (40-50 mm), Panicle5 (Heading stage) with two biological replicates from two rice varieties Zhenshan 97 & Minghui 63] and additional heading stage of Nipponbare with 3 biological replicates. GCRMA normalization of all microarray samples was performed using the justGCRMA function (Wu et al. 2018) in R software. A total of 47 samples and 5041 panicles related genes were selected from Knetminer (Hassani-Pak, 2017) database based on published reports, and differentially expressed genes across the developing panicles in rice (Kudo et al. 2013).

[0281] Weighted gene correlation network analysis WGCNA package (Langfelder and Horvath, 2008) in R was used to identify the clusters (modules) of densely connected correlated genes. First the correlation matrix (coefficient=<0.75) was transformed into a matrix of connection strengths (an adjacency matrix) by raising the correlation matrix to the soft power β(beta) of 6. The adjacency function αij=Power(sij, β0)=|sij| β where sij is the co-expression similarity, and aij represents the resulting adjacency that measures the connection strengths. The power β is chosen using the scale free topology criterion proposed in (Zhang and Horvath, 2005). The adjacency matrix is converted to TO (topological overlap) matrix. Further the hierarchical clustering was done on TO similarity using cutreeDynamic function to identify modules. The eigenvectors for each module were calculated and clustered Modules with similar eigenvalue at threshold 0.25 has been merged using merge Close Modules function.

[0282] The edge weight indicates the strength of the co-expression from all nodes to all nodes. However, selection of a stringent threshold after module detection is required to remove noise. The genes were shown as nodes and the connection strength as weighted edges. Degree of connectivity was calculated to identify intramodular hubs. Nodes with an adjacency value of zero are removed from the modules and the edges with weight >=0.30089 were only selected. The genetic variants strongly associated with different panicle architecture traits were traced in the gene networks and highlighted its interactions. The visualization of co-expression network was done using Cystoscape (Shannon et al. 2003).

[0283] Cis Motif Searching

[0284] Potential binding sites of transcription factors that may alter the expression of candidate genes were determined using TomTom (Gupta et al., 2007). Probe sequences of specific length (30 bp) overlapping each of the significant SNPs detected with targeted association results were reverse transcribed and then used as input, considering an E-value<10. The motifs were compared with entries in JASPAR Core (2018) Plants Non-Redundant DNA Database (Khan et al. 2018).

[0285] Protein-Protein Interactions

[0286] Predicted protein-protein interactions of OsTPR were determined using STRING-DB ver. 10.5 (Szklarczyk et al., 2017) at high confidence (0.700) for the minimum required interaction score including less than 10 interactors for the first shell, and zero interactors for the second shell. The active interaction sources which served as potential evidence suggesting functional link include protein-protein experimental/biochemical data, associations in curated public databases, gene-fusion, co-expression data and text mining data (PubMed abstracts) were highlighted.

[0287] Gene Prediction

[0288] According to MSU 7.0 annotation, LOC_Os02g50790 and LOC_Os02g50799 were identified as two consecutive genes matching similar biological function showing homology to nucleoprotein TPR proteins. To confirm the annotation and gene models, the genomic sequence was extracted where these two genes are present in the genome. This whole sequence was used as input to the FGENESH for predicting gene model using standard parameters (Solovyev et al., 2006). Monocot sequences of Maize, Rice, Wheat and Barley were used as training set. The gene model prediction was validated with another abinitio method named as AUGUSTUS (Stanke et al., 2003).

[0289] Multiple Sequence Alignment and Phylogenetic Analysis

[0290] Multiple sequence alignment was performed for the protein sequence of the candidate gene to decipher the phylogeny among the close relatives. Overall 13 species were under consideration including two sub-species of Oryza sativa-japonica and indica. Protein sequence of newly predicted Oryza sativa spp. japonica TPR gene from MSU7 was used to identify orthologous protein in other species including Oryza sativa spp. indica (Zhang et al., 2016). Whole proteome sequences from Ensemble database (www(dot)plants(dot)ensembl(dot)org/index(dot)html) for other species were used to identify the orthologous gene using locally installed NCBI-BLAST (Altschul et al., 1990). Multiple sequence alignment was performed using CLUSTALW (Thompson et al., 1994) after identification of candidate protein. MEGA X (Kumar et al., 2018) was used to create the NEIGHBOR-joining phylogenetic tree with 1000 bootstrap. Evolutionary distances were calculated using poisson correction method. Percentage of total replicates (1000 bootstrap) used to form the branches in the bootstrap test presented near to the branches. Another multiple sequence alignment of candidate protein was performed with 8 contrasting lines using CLUSTALW where 4 samples with higher number of upper secondary rachis branches and 4 samples with low number of upper secondary rachis braches were considered. Alignment was presented with highlighted domain and important non-synonymous SNPs.

[0291] Nucleotide Diversity Calculation

[0292] 7 SNP positons for genic region and 15 SNP position for whole LD block region were downloaded from the SNP-seek (Alexandrov et al., 2015) data for whole 3k set. Whole population was separated into different sub-population based on classification present at SNP-seek database. Minor allele frequency was calculated for each SNP at each sub-population level to verify how many candidate SNPs are present in other sub-populations. Nucleotide diversity computed using VCF tools (Danecek et al., 2011) and presented as line plot.

### Example 1

### Correlation Analyses Between Panicle Traits and Spikelet Number

[0293] Using P-TRAP software 41 traits for panicle architecture were phenotyped in 310 indica accessions. The accessions represented diverse countries and exhibited a high heritability of H²=0.69 for total number of secondary rachis branches (TSRB) and a wide range of phenotypic variation in this trait (FIG. 8). Correlation analysis revealed that TSRB was highly positively correlated with the total number of spikelets (TSP; r²=0.97). The total number of primary rachis branches (TPRB) was only moderately positively correlated with TSP (r²=0.64; FIG. 1). Apportioning the panicle into three zones, upper, middle and bottom, correlation of TSP with the number of upper, middle and bottom secondary rachis branches (USRB, MSRB and BSRB respectively) exhibited r² values of 0.66, 0.76, and 0.82, respectively. USRB was expected to have lowest correlation with TSP compared to BSRB due to acropetal reduction of SRBs within the rice panicles. On the other hand, TSP correlations with upper, middle and bottom primary rachis branches (UPRB, MPRB, BPRB respectively) showed much lower r² values of 0.4, 0.35, and 0.55, respectively. These results reinforced the idea of apportioning the panicle into three zones in order to appreciate which panicle trait modification held the promise of most gain for attaining optimal grain yield.

### Example 2

### New Genetic Loci Identified to Influence Upper Secondary Rachis Branches

[0294] Single-locus GWAS (slGWAS) underpinned genomic regions with significant association to various panicle architecture traits through 747,087 high quality bi-allelic SNP markers from 309 resequenced indica samples. The genotyping rate was 99.98% and minor allele frequency was greater than 10%. Genomic association was most pronounced for variation in USRB and a clear candidate region was demarcated by the slGWAS peak (FIGS. 2A-D). The quantile-quantile (QQ) plot (FIG. 2B) revealed that the effects of confounding factors such as population structure did not increase the rate of false positives in the GWAS. Results showed prominent peaks on Chromosomes 1 and 2 with 230 significant SNPs of q-values <0.05 (FIG. 2A, Table A in T) with genetic variance of 0.83. From the 230 significant SNPs, 33 were located on chromosome 1 and explained 0.62 of genetic variance (σ²_{G}) in a 592.6 Kb interval between LOC_Os01g10680 to LOC_Os01g11660.

[0295] The 197 SNPs on chromosome 2 were mapped within a 126.4 kb interval with five distinct linkage disequilibrium (LD) blocks (FIG. 2B). The tagged markers found in this region exhibited equal beta-effects conferring genetic variance (σ²_{G}) of 0.49. While all SNPs showed positive effect to the trait of interest based on beta coefficients (β>0.2880), a single significant SNP (snp_02_14377682) in LOC_Os02g24780 showed high negative effect (β=−0.5851, p=1.0597e-05) on the USRB. Among the five linkage disequilibrium (LD) blocks, haplotypes defined, based on the tag SNPs within LD block 4, clearly distinguished a wide range of phenotypes for high and low USRB (FIG. 2C).

[0296] To identify multi-marker cumulative effect, gene-set analysis was performed. Based on the gene level analysis, top 10 genes significantly associated to USRB with highest p-values were identified (not shown). The strongest association (p=0.013498) with USRB was detected in the gene set consisting of LOC_Os02g50700, LOC_Os02g50790 and LOC_Os02g50799. The two latter candidate genes (LOC_Os02g50790 and LOC_Os02g50799) were annotated in public databases as two separate genes with homology to nuclear pore anchor proteins. Both were related to flower development through gene ontology. However, gene model prediction using ‘AUGUSTUS’ with indica training set confirmed these to be a single gene of 24,444 bp encoding a protein of 2050 amino acids (FIG. 9). LOC_Os02g50790/LOC_Os02g50799 encodes an orthologue of the Arabidopsis translocated promoter region gene (AtTPR) belonging to nuclear pore complex (FIGS. 15-17). Therefore, it was called OsTPR. Interestingly, 60 SNPs were found in OsTPR. Among them, six SNPs were missense mutations causing amino acid changes. One such amino acid change was located in the TPR domain (c.3480A>C;p.Gln1160His; FIG. 16). In addition, one SNP was in the promoter region (snp_02_31035009) at a potential SPL3/SPL14 transcription factor binding motif of 5′-TNCGTACAA-3′ (FIG. 3).

### Example 3

### Haplotype Analysis of OsTPR for Increased Panicle Branching and Yield

[0297] Haplotype analysis for OsTPR formed from the significant SNPs revealed that lines with high USRB contained the ‘superior’ haplotype1 (AGGATCA, SEQ ID NO: 1). In comparison, lines with low USRB were associated with ‘inferior’ haplotype2 (TATTCGG, SEQ ID NO: 2), haplotype3 (TATTCCG, SEQ ID NO: 3) and haplotype4 (TATACCG, SEQ ID NO: 4; FIG. 3). The direct proportionality between USRB and TSP reflected in that the superior haplotype had relatively high TSP, potentially leading to increased yield parameters. Haplotype3 had lowest USRB. The OsTPR promoter region in lines with high and low USRB contained binding motifs for SPL3 and SPL14 although lower p- and E-values were observed for latter (FIG. 3).

[0298] Importantly, lines of haplotype 1 had low chalk content and those with haplotype 3 had high chalk content. This result suggested an association of OsTPR with increased USRB and TSP without compromising the grain quality. Additionally, analysis of grain quality traits indicated that the amylose content, gel temperature, viscosity, retrogradation, and cooking traits such as the cooked grain length and width (FIG. 10), were better or maintained in the OsTPR haplotype 1 grains on USRB.

[0299] Allele mining using 3k rice genomes revealed that within the indica subgroup the superior haplotype 1 was enriched while the inferior haplotype 3 was least represented (FIG. 3). The superior haplotype1 was not found in japonica subgroup suggesting its importance as an approach for improving the japonica rice lines. Phylogenetic analysis of 13 putative OsTPR homologues revealed that the indica haplotype was related to O. nivara while the japonica one was likely derived from O. rufipogon (FIGS. 11A-D). To test whether the 7 SNP haplotype, which is significantly associated with increased USRB, was differentially selected at the subgroup level, nucleotide diversity was calculated. It was found to be significantly higher in indica indicating its preferential selection compared to the aromatic and japonica sub-types (FIGS. 4A-C).

### Example 4

### Identification of Genetic Variants that are Associated with Primary and Secondary Rachis Branches Contributing to Increased Grain Number

[0300] Since slGWAS does not account for small to medium effect loci, multi-locus GWAS (mlGWAS) analysis was used to identify the integrated effect of multiple markers on the phenotype and determine genomic regions of significant association with panicle branching traits and number of total spikelets. Additional 208 loci were identified across the 12 chromosomes for significant associations with different panicle architecture traits (not shown).

[0301] Among them were several important transcription factors and hormone responsive genes (FIG. 5). These included genetic variants in the upstream region of HOMEOBOX4 (HOX4), which strongly associated with TSP (LOD score 7.84); a SNP downstream of TAWAWA1 for TPRB (LOD score 7.79) and a non-synonymous SNP in FAR1-related gene for TSRB (LOD score 4.1). Additional SNP variants were identified among transcription factor genes (FIG. 5) encoding OsMYB4P and OsMYB/SANT (strongly associated for USRB); OsUBC6 and an APETALA2 (AP2) domain-containing protein (associated with MSRB); and OsFBOX75 and OsFBOX252 proteins (associated with BSRB). Among the genes identified in mlGWAS analysis only one was a cloned gene (TAWAWA1) validated to affect panicle architecture in rice.

[0302] Many SNPs found in the 37 genes (transcription factor and hormone responsive genes previously cloned useful in yield/flower/panicle traits) exhibited small to intermediate effect associations with primary and secondary rachis branching traits (not shown). To identify the association between sub-traits of branching with TSP, association networks for genetic variants identified from slGWAS, mlGWAS and targeted association approaches were delineated.

[0303] Interestingly, DWARF11 and MOC1 contribute to increase in total spikelets due to increased number of rachis branches of MSRB, TPRB and BSRB (FIG. 5); Thus association network identified DWARF11 and MOC1 as central regulators to increase TSP by increasing secondary branching at the middle and bottom portion of panicles. The DWARF11 and MOC1 in such lines were thus the superior haplotypes. These lines also maintained superior grain quality (FIGS. 11A-D). Similarly, the superior haplotypes of OsTPR and OsMYB4P which associated with USRB contributed to increased total spikelets without impairing grain quality in terms of chalk content (FIGS. 12A-D). Interestingly however, lines that possessed superior haplotypes for all the four genes of DWARF11, MOC1, OsTPR and OsMYB4P exhibited additional total spikelet increase (median of 250) with higher number of filled spikelets per plant, due to recombined superior haplotypes of USRB, MSRB and BSRB (FIG. 6) and also exhibited slightly reduced number of panicle per plant. These naturally pyramided lines (IRIS_313-9472, IRIS_313-8903, IRIS_313-10396, IRIS_313-9832, IRIS_313-9605) with higher total spikelets (FIG. 6) had no trade-off with percentage of chalk and head rice yield (FIGS. 12A-D). When additional grain quality parameters and yield parameters were assessed, results demonstrated that when the superior allele of OsTPR was present, the increased number of spikelets (by virtue of increased upper secondary rachis branching) maintained superior grain quality (FIGS. 10, 12A-D). These results proposed that the novel gene identified, namely OsTPR, for the first time, enhance yield parameters without negative effect on grain quality.

### Example 5

### Integrating Genetic Variants Identified in GWAS with Coexpression Networks of Panicle Development

[0304] To overcome any spurious association sometimes predicted by GWAS, genetic variants identified through slGWAS, mlGWAS, and targeted association approaches were linked to the transcriptome co-expression networks data at panicle development stage. This elucidated increased connectivity of nodal genes linked to key candidate genes as the central hub. The co-expression analysis of 5,041 genes, expressed during panicle development, clustered them into 17 modules (FIG. 7A). Among them, the blue module (FIG. 7B) possessing the phosphoribulokinase (LOC_Os02g47020) gene as central hub depicted high degree of connectivity with the 866 nodes with edge weight ≥0.3. Within this module, critical panicle architecture genes such as OsMyB4P and OsTPR displayed high to moderate degree of connectivity. Genetic variants of these two genes strongly associated with USRB phenotypes (FIGS. 12A-D). Further, analysis of the first neighbors of OsTPR identified 243 closely associated nodes (FIG. 14A). Major functional categories of genes coexpressed in the sub-module of OsTPR belong to cell cycle organization, photosynthesis, RNA regulation, developmental process, and protein synthesis. Important transcription factors such as G2-like, HB, MYB, bZIP, ARF, bHLH, C2C2(Zn)CO-like, zf-HD, GRF, C₂C₂(Zn)GATA were found to be closely linked (FIG. 14A). Also, several genes involved in panicle branching linked with OsTPR at a higher degree of connectivity (FIG. 14A). These include OsGRF4 (LOC_Os02g47280) and LAX1 (LOC_Os01g61480) that associate with USRB; SPL7 (LOC_Os05g45410) associated with MSRB, and APO2/RFL (LOC_Os04g51000) associated with BSRB. The genetic variants of these were validated in our targeted association analysis (not shown). In the same module, several SPL family members were found which includes SPL14/IPA1/WFP (LOC_Os08g39890), SPL5(LOC_Os07g10390), SPL4 (LOC_Os02g07780), SPL (LOC_Os01g01080), SPPL1 (LOC_Os10g25360). Other key genes such as GAD1 (LOC_Os08g36320), Dwarf11 (LOC_Os04g39430), MOC2/FBP1 (LOC_Os01g64660), FON1 (LOC_Os06g50340), and MFT1 (LOC_Os06g30370) were linked with panicle architecture traits (FIG. 14A).

[0305] Further evidence for the importance of OsTPR protein came from protein-protein interactions (FIG. 14B). It suggested a role in positive activation of the nuclear pore protein (NPP, LOC_OS11g42420). NPP binds with OsLIC, a transcriptional activator involved in rice plant architecture regulation. The NPP also interacts with a SAC3/GANP protein (LOC_Os07g45160) potentially involved in nuclear mRNA export. Two Ulp1 proteases (LOC_Os03g29630 and LOC_Os03g22400 proteins), and a small ubiquitin-like modifier (SUMO) protease (LOC_Os01g25370), have gene ontology of flower development (GO:0009908) aside from hydrolase activity (GO:0016787) and protein modification process (GO:0006464). These three proteases are localized in the nucleus and potentially interact especially LOC_Os01g25370 and LOC_Os03g22400. Thus, OsTPR interacts with proteins involved in ubiquitination and SUMOylation pathway influencing plant architecture regulation (FIG. 14B). The Arabidopsis orthologue of TPR is also a SUMO interacting protein (Xu et al 2007).

### Example 6

### Breeding Proof of Concept to Increase the Upper Secondary Rachis Branching

[0306] Methodology (Shown in FIG. 18)

[0307] The F₅-derived F6 Recombinant Inbred lines (RILs) has been developed using single seed descent (SSD) method by employing the hybridization between high amylose mutant IR36ae (possess inferior haplotype of OsTPR TATTCGG haplotype SEQ ID NO: 2) and superior haplotype of OsMOC1 CG haplotype) and Samba Mahsuri (possess superior haplotype of OsTPR AGGATCA haplotype SEQ ID NO: 1) and inferior haplotype of OsMOC1 GA haplotpe). The Sambha Mahsuri parent is one of the most popular varieties consumed mainly across India due to its excellent cooking and eating qualities.

[0308] A total of 369 F3 progenies were selected and eventually forwarded to advanced generation until F₅, utilizing single seed descent (SSD) method through rapid generation advancement. During the 2019 wet season a field experimental trial was conducted by growing a set of selected 298 F₅ progenies in randomized complete block design with 2 replications, which were eventually termed as F5:6 RILs population. Out of them, a total of 280 samples from SM×IR36ae F5 population was successfully phenotyped using GIMP and P-TRAP software. Genotype data for the candidate genes OsTPR and OsMOC1 identified previously using in silico approaches were obtained using the KASP genotyping assay technology. In the diversity panel GWAS analysis, AGGATCA (SEQ ID NO: 1) was the superior haplotype identified for TPR based on the reference genome Nipponbare. In the current genotype data generated using KASP genotyping assay technology, the complementary alleles of TPR haplotype TCCTAGT were generated since the TPR gene is in the negative strand (3′ to 5′). Samples with missing genotyping data for the significant SNPs in each candidate gene were removed. In addition, lines containing heterozygotes were also removed when forming the haplotypes. Lines possessing haplotypes with homozygous alleles for OsTPR and OsMOC1 are 210 and 251 samples, respectively. A total of 195 samples have complete phenotype and genotype data for OsTPR and OsMOC1 haplotypes. Comparison of haplotype effects of OsTPR, OsMOC1, and combination of OsTPR and OsMOC1 with measured 21 panicle architecture phenotype data was done using t-test or Wilcoxon test. Boxplots were constructed using ggplot package in R after removing heterozygotes.

[0309] Although the invention has been described in conjunction with specific embodiments thereof, it is evident that many alternatives, modifications and variations will be apparent to those skilled in the art. Accordingly, it is intended to embrace all such alternatives, modifications and variations that fall within the spirit and broad scope of the appended claims.

[0310] It is the intent of the applicant(s) that all publications, patents and patent applications referred to in this specification are to be incorporated in their entirety by reference into the specification, as if each individual publication, patent or patent application was specifically and individually noted when referenced that it is to be incorporated herein by reference. In addition, citation or identification of any reference in this application shall not be construed as an admission that such reference is available as prior art to the present invention. To the extent that section headings are used, they should not be construed as necessarily limiting. In addition, any priority document(s) of this application is/are hereby incorporated herein by reference in its/their entirety.

### REFERENCES

[0311] 1. Zhu, Z. et al. Genetic control of inflorescence architecture during rice domestication. Nature Communications 4, 2200 (2013).
[0312] 2. Sweeney, M. & McCouch, S. The complex history of the domestication of rice. Annals of Botany 100, 951-957 (2007).
[0313] 3. Ikeda-Kawakatsu, K. et al. Expression level of ABERRANT PANICLE ORGANIZATION1 determines rice inflorescence form through control of cell proliferation in the meristem. Plant Physiology 150, 736-747 (2009).
[0314] 4. Ikeda, K., Sunohara, H., & Nagato, Y. Developmental course of inflorescence and spikelet in rice. Breeding Science 54, 147-156 (2004).
[0315] 5. Ying, J., Chen, Y., & Zhang, H. Functional Characterization of Genes/QTLs for Increasing Rice Yield Potential, Rice: Germplasm, Genetics and Improvement (ed. Yan, W.) DOI: 10.5772/51100 (InTech, 2014).
[0316] 6. Xing, Y. & Zhang, Q. Genetic and molecular bases of rice yield. Annual Review of Plant Biology 61, 421-442 (2010).
[0317] 7. Li, X. et al. Control of tillering in rice. Nature 442, 618-621 (2003).
[0318] 8. Huang, X., et al. Natural variation at the DEP1 locus enhances grain yield in rice. Nature Genetics 41, 494-497 (2009).
[0319] 9. Tabuchi, H. et al. LAX PANICLE2 of rice encodes a novel nuclear protein and regulates the formation of axillary meristems. Plant Cell 23, 3276-3287 (2011).
[0320] 10. Ashikari, M. et al. Cytokinin oxidase regulates rice grain production. Science 309, 741-745 (2005).
[0321] 11. Fujita, D. et al. NAL1 allele from a rice landrace greatly increases yield in modern indica cultivars. Proceedings of the National Academy of Sciences, USA 110, 20431-20436 (2013).
[0322] 12. Komatsu, M., Chujo, A., Nagato, Y., Shimamoto, K., & Kyozuka, J. FRIZZY PANICLE is required to prevent the formation of axillary meristems and to establish floral meristem identity in rice spikelets. Development 130, 3841-3850 (2003).
[0323] 13. Chen, J. et al. An evolutionarily conserved gene, FUWA, plays a role in determining panicle architecture, grain shape and grain weight in rice. The Plant Journal 83, 427-438 (2015).
[0324] 14. Sun, P. et al. OsGRF4 controls grain shape, panicle length and seed shattering in rice. Journal Integrative Plant Biology 58, 836-847 (2016).
[0325] 15. Wu, Y. et al. CLUSTERED PRIMARY BRANCH 1, a new allele of DWARF11, controls panicle architecture and seed size in rice. Plant Biotechnology Journal 14, 377-386 (2016).
[0326] 16. Yoshida, A. et al. TAWAWA1, a regulator of rice inflorescence architecture, functions through the suppression of meristem phase transition. Proceedings of the National Academy of Sciences, USA 110, 767-772 (2013).
[0327] 17. Lu, L. et al. Natural variation and artificial selection in four genes determine grain shape in rice. New Phytologist 200, 1269-1280 (2013).
[0328] 18. Weng, X. et al. Grain number, plant height, and heading date? Is a central regulator of growth, development, and stress response. Plant Physiology 164, 735-747 (2014).
[0329] 19. Miura, K. et al. OsSPL14 promotes panicle branching and higher grain productivity in rice. Nature Genetics 42, 545-550 (2010).
[0330] 20. Mohapatra, P. K. A Physiological Approach to Design Rice Panicle Architecture in the Quest for High Grain Yield, International Dialogue on Perception and Prospects of Designer Rice (eds. Muralidharan, K. & Siddiq, E. A.) 131-142 (Directorate of Rice Research, 2013).
[0331] 21. Matsue, Y., Odahara, K., & Hiramatsu, M. Differences in protein content, amylose content and palatability in relation to location of grains within rice panicle. Japanese Journal of Crop Science 63, 271-277 (1994).
[0332] 22. Matsue, Y., Odahara, K., & Hiramitsu, M. Differences in amylose content, amylographic characteristics and storage proteins of grains on primary and secondary rachis branches in rice. Japanese Journal of Crop Science. 64, 601-606 (1995).
[0333] 23. Das, K. et al. Grain density and its impact on grain filling characteristic of rice: mechanistic testing of the concept in genetically related cultivars. Nature Scientific Reports 8, 4149 (2018).
[0334] 24. Adriani et al. Rice panicle plasticity in Near Isogenic Lines carrying a QTL for larger panicle is genotype and environment dependent. Rice 9, 28 (2016).
[0335] 25. Wang, F., Cheng, F., & Zhang, G. Impact of cultivar variation in grain density of rice panicle on grain weight and quality. Journal of the Science of Food and Agriculture 88, 897-903 (2008).
[0336] 26. Nhung et al. A genome-wide association study using a Vietnamese landrace panel of rice (Oryza sativa) reveals new QTLs controlling panicle morphological traits. BMC Plant Biology 18, 828 (2018).
[0337] 27. Crowell, S. et al. Genome-wide association and high-resolution phenotyping link Oryza sativa panicle traits to numerous trait-specific QTL clusters. Nature Communications 7, 10527 (2016).
[0338] 28. Rebolledo, M. C. et al. Combining image analysis, genome wide association studies and different field trials to reveal stable genetic regions related to panicle architecture and the number of spikelets per panicle in rice. Frontiers in Plant Science 7, 1384 (2016).
[0339] 29. Panda, B. B. et al. Compact panicle architecture is detrimental for growth as well as sucrose synthase activity of developing rice kernels. Functional Plant Biology 42, 875-887 (2015).
[0340] 30. Krull, S., Thyberg, J., Bjorkroth, B., Rackwitz, H. R., & Cordes, V. C. Nucleoporins as components of the nuclear pore complex core structure and Tpr as the architectural element of the nuclear basket. Molecular Biology of the Cell 15, 4261-4277 (2004).
[0341] 31. Jacob, Y., Mongkolsiriwatana, C., Veley, K. M., Kim, S. Y. &, Michaels, S. D. The nuclear pore protein AtTPR Is required for RNA homeostasis, flowering time, and auxin signaling. Plant Physiology 144, 1383-1390 (2007).
[0342] 32. Tanya, Z. B. et al. The Arabidopsis Information Resource: Making and mining the “gold standard” annotated reference plant genome. Genesis 53, 474-485 (2015).
[0343] 33. Yates, G., Srivastava, A. K., & Sadanandom, A. SUMO proteases: uncovering the roles of deSUMOylation in plants. Journal of Experimental Botany 67, 2541-2548 (2016).
[0344] 34. Murtas, G. et al. A nuclear protease required for flowering-time regulation in Arabidopsis reduces the abundance of SMALL UBIQUITIN-RELATED MODIFIER conjugates. The Plant Cell 15, 2308-2319 (2003).
[0345] 35. Wang, L. et al. OsLIC, a novel CCCH-type zinc finger protein with transcription activation, mediates rice architecture via brassinosteroids signaling. PLOS One 3, e3521 (2008).
[0346] 36. Wolfe, C. J., Kohane, I. S., & Butte, A. J. Systematic survey reveals general applicability of “guilt-by-association” within gene coexpression networks. BMC Bioinformatics 6,227 (2005).
[0347] 37. Preston, J. C. & Hileman, L. C. Functional evolution in the plant SQUAMOSA-PROMOTER BINDING PROTEIN-LIKE (SPL) gene family. Frontiers in Plant Science 4, 80 (2013).
[0348] 38. Cardon, G. H., Hohmann, S., Nettesheim, K., Saedler, H., & Huijser, P. Functional analysis of the Arabidopsis thaliana SBP-box gene SPL3: a novel gene involved in the floral transition. The Plant Journal 12, 367-377 (1997).
[0349] 39. Wu, G. & Poethig, R. S. Temporal regulation of shoot development in Arabidopsis thaliana by miR156 and its target SPL3. Development 133, 3539-3547 (2006).
[0350] 40. Stone, J. M., Liang, X., Nekl, E. R. & Stiers, J. J. Arabidopsis AtSPL14, a plant-specific SBP-domain transcription factor, participates in plant development and sensitivity to fumonisin B1. The Plant Journal 41, 744-754 (2005).
[0351] 41. Zhou et al. GNS4, a novel allele of DWARF11, regulates grain number and grain size in a high-yield rice variety. Rice 10, 1-15 (2017).
[0352] 42. Xu et al. Developmental functions of rniR/56-regulated SQUAMOSA PROMOTER BINDING PROTEIN-LIKE (SPL) genes in Arabidopsis thaliana. PLOS Genetics 12, e1006263 (2016).
[0353] 43. Al-Tam, F. M. et al. P-TRAP: A panicle trait phenotyping tool. BMC Plant Biology 13, 122 (2013).
[0354] 44. Fusi, N., Lippert, C., Lawrence, N. D. & Stegle O. Warped linear mixed models for the genetic analysis of transformed phenotypes. Nature Communications 5, 4890 (2014).
[0355] 45. Chang C. C. et al. Second-generation PLINK: rising to the challenge of larger and richer datasets. Gigascience 4, 7 (2015).
[0356] 46. Tabangin, M. E., Woo, J. G., & Martin, L. J. The effect of minor allele frequency on the likelihood of obtaining false positives. BMC Proceedings 3, Suppl7 (2009).
[0357] 47. Kang, H. M. et al. Variance component model to account for sample structure in genome-wide association studies. Nature Genetics 42, 348-354 (2010).
[0358] 48. R Core Team. R: A language and environment for statistical computing (R Foundation for Statistical Computing, Vienna) Available at: www(dot)R-project(dot)org (2018).
[0359] 49. Lin, Y. & Lee, W. Importance of presenting the variability of the false discovery rate control. BMC Genetics 16, 97 (2015).
[0360] 50. Barrett, J. C., Fry, B., Maller, J., & Daly, M. J. Haploview: Analysis and visualization of LD and haplotype maps. Bioinformatics 21, 263-265 (2005).
[0361] 51. de Leeuw, C. A., Mooij, J. M., Heskes, T., & Posthuma, D. MAGMA: Generalized gene-set analysis of GWAS data. PLOS Computational Biology 11, e1004219 (2015).
[0362] 52. Kawahara, Y. et al. Improvement of the Oryza sativa Nipponbare reference genome using next generation sequence and optical map data. Rice 6, 4 (2013).
[0363] 53. Misra et al. Deciphering the genetic architecture of cooked rice texture. Frontiers in Plant Science DOI:10.3389/fpls.2018.01405 (2018).
[0364] 54. Bradbury, P. J. et al. TASSEL: Software for association mapping of complex traits in diverse samples. Bioinformatics 23, 2633-2635 (2007).
[0365] 55. Wickham, H. ggplot2: Elegant Graphics for Data Analysis (Springer-Verglag, New York) Available at www(dot)ggplot2(dot)org (2016).
[0366] 56. Shannon, P. et al. Cytoscape: A software environment for integrated models of biomolecular interaction networks. Genome Research 13, 2498-2504 (2003).
[0367] 57. Wu, R. I., MacDonald, J. & Gentry, J. gcrma: Background Adjustment Using Sequence Information. Available at: www(dot)bioconductor(dot)org/packages/release/bioc/html/gcrma(dot)html (2018).
[0368] 58. Hassani-Pak, K. KnetMiner—An integrated data platform for gene mining and biological knowledge discovery (Universität Bielefeld, Bielefeld) Available at: www(dot)pub(dot)uni-bielefeld(dot)de/publication/2915227 (2017).
[0369] 59. Kudo, T. et al. UniVIO: A multiple omics database with hormonome and transcriptome data from rice. Plant Cell Physiology 54, e9 (2013).
[0370] 60. Langfelder, P. & Horvath, S. WGCNA: an R package for weighted correlation network analysis. BMC Bioinformatics 9, 559 (2008).
[0371] 61. Zhang, B., & Horvath, S. A general framework for weighted gene co-expression network analysis. Statistical Applications in Genetics and Molecular Biology 4, 17 (2005).
[0372] 62. Gupta, S., Stamatoyannopoulos, J. A., Bailey, T. L., Noble, W. S. Quantifying similarity between motifs. Genome Biology 8, R24 (2007).
[0373] 63. Khan, A. et al. JASPAR 2018: update of the open-access database of transcription factor binding profiles and its web framework. Nucleic Acids Research 46, 260-266 (2018).
[0374] 64. Szklarczyk, D. et al. The STRING database in 2017: quality-controlled protein-protein association networks, made broadly accessible. Nucleic Acids Research 45, 362-368 (2017).
[0375] 65. Solovyev, V., Kosarev, P., Seledsov, I., Vorobyev, D. Automatic annotation of eukaryotic genes, pseudogenes and promoters. Genome Biology 7, Suppl 1 (2006).
[0376] 66. Stanke, M. & Waack, S. Gene prediction with a hidden Markov model and a new intron submodel. Bioinformatics 19, ii215-225 (2003).
[0377] 67. Zhang, J. et al. Extensive sequence divergence between the reference genomes of two elite indica rice varieties Zhenshan 97 and Minghui 63. Proceedings of the National Academy of Sciences, USA 113, E5163-5171 (2016).
[0378] 68. Altschul, S. F., Gish, W., Miller, W., Myers, E. W., & Lipman, D. J. Basic local alignment search tool. Journal of Molecular Biology 215, 403-410 (1990).
[0379] 69. Thompson, J. D., Higgins, D. G. & Gibson, T. J. CLUSTAL W: improving the sensitivity of progressive multiple sequence alignment through sequence weighting, position-specific gap penalties and weight matrix choice. Nucleic Acids Research 11, 4673-4680 (1994).
[0380] 70. Kumar, S., Stecher, G., Li, M., Knyaz, C., & Tamura, K. MEGA X: Molecular evolutionary genetics analysis across computing platforms. Molecular Biology and Evolution 35, 1547-1549 (2018).
[0381] 71. Alexandrov, N. et al. SNP-Seek database of SNPs derived from 3000 rice genomes. Nucleic Acids Research 43, D1023-1027 (2015).
[0382] 72. Danecek, P. et al. The variant call format and VCFtools. Bioinformatics 15, 2156-2158 (2011).
[0383] 73. Yang, W. T., Baek, D., Yun, D. J., Hwang, W. H., Park, D. S., Nam, M. H., Chung, E. S., Chung, Y. S., Yi, Y. B., Kim, D. H. 2014. Overexpression of OsMYB4P, an R2R3-type MYB transcriptional activator, increases phosphate acquisition in rice. Plant Physiol Biochem. 80:259-67. doi: 10.1016/j.plaphy.2014.02.024.
[0384] 74. Xu X. M., Rose A., Muthuswamy S., Jeong S. Y., Venkatakrishnan S., Zhao Q., et al. (2007). NUCLEAR PORE ANCHOR, the Arabidopsis homolog of Tpr/Mlp1/Mlp2/megator, is involved in mRNA export and SUMO homeostasis and affects diverse aspects of plant development. Plant Cell 19 1537-1548. 10.1105/tpc.106.049239.

What is claimed is:

1. A method of enhancing grain yield of a Gramineae plant, the method comprising:
(a) crossing a recipient plant with a donor plant comprising a sequence variation in a TPR allele, said sequence variation imparting enhanced grain yield; and
(b) selecting a progeny plant of said crossing comprising said sequence variation by identifying said variation, said progeny plant being characterized by an improved grain yield relative to said recipient plant.

2. A method of enhancing grain yield of a Gramineae plant, the method comprising:
(a) crossing a recipient plant with a donor plant comprising a TPR allele of haplotype I; and
(b) selecting a progeny plant of said crossing comprising said TPR allele of haplotype I by identifying said variation, said progeny plant being characterized by an improved grain yield relative to said recipient plant.

3. The method of claim 1, wherein said recipient plant is heterozygous for said sequence variation or haplotype I.

4. The method of claim 1, wherein said recipient plant is null for said sequence variation or haplotype I.

5. The method of claim 1, wherein said selecting is based on phenotypic screening for a grain yield- and/or grain quality-associated trait.

6. The method of claim 1, wherein said selecting is by marker-assisted selection.

7. The method of claim 1, further comprising:
(c) backcrossing the one or more of selected progeny plants to produce backcross progeny plants; and
(d) selecting a backcross progeny plant comprising said sequence variation or haplotype I by identifying said variation, said progeny plant being characterized by an improved grain yield relative to said recipient plant.

8. The method of claim 1, wherein said donor and/or recipient plant is a rice plant.

9. The method of claim 1, wherein said recipient rice plant is of a variety comprising a sequence variation in a gene selected from the group consisting of D11, MOC1, and MYB4P.

10. The method of claim 1, comprising breeding said recipient plant, donor plant or progeny plant to comprise a sequence variation in a gene selected from the group consisting of D11, MOC1, and MYB4P.

11. The method of claim 9, wherein said recipient plant or said progeny comprises a sequence variation in a gene selected from the group consisting of D11, MOC1, and MYB4P is show in Table A.

12. The method of claim 5, wherein said grain quality-associated trait is selected from the group consisting of amylose content, chalkiness, gel temperature, viscosity, retrogradation, and cooking traits such as the cooked grain length or width.

13. The method of claim 1, wherein said grain yield is manifested by at least one of TSP, USRB and head rice yield.

14. A plant obtainable according to the method of claim 1, wherein the plant is not of the variety Samba Mahsuri.

15. An elite line of a Gramineae plant comprising a sequence variation in a TPR allele or a haplotype I, said plant being characterized by an improved grain yield as compared to a control plant, wherein the plant is not of the variety Samba Mahsuri.

16. The elite line of claim 15, wherein said recipient rice plant comprises a sequence variation in a gene selected from the group consisting of D11, MOC1, and MYB4P.

17. The plant of claim 14 being a rice plant.

18. A part of the plant of claim 14.

19. A processed product comprising DNA of the plant of claim 14.

The application's sequence listing, which the Patent Office published only in electronic form, follows.

SEQUENCE LISTING (31 sequences)

SEQ ID NO: 1 - DNA, 7 bp, Artificial sequence
  Haplotype 1 nucleic acid sequence
aggatca

SEQ ID NO: 2 - DNA, 7 bp, Artificial sequence
  Haplotype 2 nucleic acid sequence
tattcgg

SEQ ID NO: 3 - DNA, 7 bp, Artificial sequence
  Haplotype 3 nucleic acid sequence
tattccg

SEQ ID NO: 4 - DNA, 7 bp, Artificial sequence
  Haplotype 4 nucleic acid sequence
tataccg

SEQ ID NO: 5 - DNA, 31 bp, Artificial sequence
  HUSRB nucleic acid sequence
ttgatcgttccgtactaactaccaagtgagc

SEQ ID NO: 6 - DNA, 31 bp, Artificial sequence
  LUSRB nucleic acid sequence
ttgatcgttccgtaccaactaccaagtgagc

SEQ ID NO: 7 - DNA, 27944 bp, Oryza sativa
  misc_feature (1097)..(1097): snp_2_31035009
  misc_feature (9152)..(9152): snp_02_31026954( G>C): Glu>Gln
  misc_feature (11557)..(11557): snp_02_31024549(G>A):Glu>Lys
  misc_feature (13026)..(13026): snp_02_31023080 (T>A): Leu>Met
  misc_feature (17095)..(17095): snp_02_31019010 (A>C): Gln>His
  misc_feature (22361)..(22361): snp_02_31013745 (T>C): Val>Ala
  misc_feature (25857)..(25857): snp_02_31010249 (A>T): Met>Leu
atgcctgaaaaaaggggtaaaattgtggtttcctcaagattggatgtgggtgtagggatggtgcacgaatgtagacagatgtgagatttgtgattgcttccagcactgctttgaaatatctatgtattgtatctggactatgctgaaaccaatcttgaagtgtttcattggttgcattttttgccactgtatataagaatatagcaatatgctcttctactgaaacatatagtgccagttaggtactctttctcacgtaacttattgactagtgcatgaaaaatgtcgacctccatacggaagtttcttttgcataatctttcatgtcctgttaaaatctcatgtacacggcaaccccctgtaagttttgacgtgtgcattggtctcctaatacaagatgattgtgatgaatctcctaaagtaggcagaacaaaatgaatgaactcatcatcactttctgatatacgtcggtagcttggattcatggtgtgcagatgttaccaaactgatgctgtaaactcaaatagaagagagctaaaaatcaagacttttgctgaggaaaaaacaattttggtgcaccagatgaacaagtagtaccttgttgttacacgagcaagtaacgtccagctatggtggctagacgatgagtaaagcttctggaaaaattatgcagatagtgaagagaagagcaaaggatcagcaagcttcttccacagttgatgagcaaatagaaagaacaggggaaaatggtgcacaaggctaacgagggctatttatgcacttcaaagctaacggctagttgagggccgatgtcagttgatgcaaacttaaaaaaatatatttcaaacggcagatttcctacacttctcctgcggtatatccgaatgcacactttttttaaattcctgacgtttagcttcccataggattggactccacagctatccctattccttcatttttcctaatcctatgagtgaaaaaatcctttaaaacgagtaagcccttactgtgacgatcagtatttatcgggaacggggtctttccttttcttttggaggctttaacttcttccagcattttgaccgttccgtacnaactaccaagtgagcttctgatggttttgtctaagaaaaccatgatttggcgatggcagcctttattgaaagacataccaagcgctgggtggtcacatctcagggcttgtttggtagaactctaacttataaatttagcttcaagagttgggtctggagtgaagttgtggagctgtctaaacccagctttacctttctagttcattttatgagagaacactagctccgctcccatttcaggtggagctgaaacggtttggttgagctccagctccgggagaggtggagttggagctggagctgtgacaaacaggccctcagttcctagatttgcattgacgctccaacgggaatattcgtgcacaagtaatcgagttttgtatatttaccgacgaatggaatacgcatatttttttttctttacttgaactcccgtgcagtgcactggagatgacatcattagagcatcaccaagagattacatataacctctaaaaatttgtttttttttcataaactcaaaataggaaacaaaataagtaatatcttaaagaaaaacctaaattttattaaaaaaaatataaaagtgagaccttattaaactaccaaaagaatttccattttacttcgtcagcgcacactatctcctggcgctcccctgaagccgcgccaggagaggaggaaggtgggagcagctagattggaagtgggcaaggaagccgctttctcccgtatatcaacagagcaaatatttcgggaaagagaactccaaaaatcatgcaactgagtaagggactcgtttgagtgctttctttcactaaaatccctcaaaattgattttgagatgaaatagggataaaatagaaggactgttggtgatgcttatttattctcctgttttatagggttttaacgaattgagatcaaatacagtagctattaggactgcacacaatctgagccctctatgtctaaatctaacggccaaaaaggatttggcacagtacaattagaacagtacccttccacagtaaaatgctacagtgttttctacagtctcagatgtatctcggacgtccatttttaatcatgcgatgctagtgtgactgcttatcttgcatcacactagctactgcacctgaatcgggtccggtttaaacatgtgaaactcggaaacggctttttagacgaagacagcccacaaactcataggcctacacgccacagcccgagaaacagaagcccagcaatccggcccaaacaagtcactcagcagtcagcaggtctcacaggcccaccagatagtccatgggccttgggccgagcctatccgaccgccttcacgcgtccttccttccgacctatatttctgcctcgccctcctctcgccccttccccttcgcgtttgcgtttcctccgcctcctcactccaattccattcgccttccgccaccaccacccttggctcctcccctccccgcggggcgcgcgacaaaccctagaaccttctagaggctagagcggtagagccatccgcgagggccccgggcgggctaggggcgccgcctacccgaccccgcacgcggcggcgatgccgctcttcatgtcggaggaggagctgcggctcttgggcggtgacgtggccgccgtcgccgagcgggccgacgccgccatccgcgagctccggcagcaggtggacaccgtccgtgccgaggccgacgcggcggccatcgcggcggagcagacgtgcgccctcctcgagcagcgctacgacactctctccgccgaggccgatcgcttccgggccgagctagccgagctcgcggctgcctccgagcgccgcgccgccgatctcgcctcttcccagtccgagatacaccagctccgcatccaagccgtacgaaccctagtttttatttgggttcagctcagtttttcggcttagctgaggtcacactgatcactctgtgctgctgatggggtttgcagattgcgaaggatggcgagattgaacggctgaaagtagaaatctcggaggtgcacaagtccaagtcgcagtcactggaactaattgagcagagggatgcagagataagggagaaggatggcatcatccagaactacctcgataaaatagtaagccatcctgaccattttgtactcccacttctagtgatgcacagcatccagcaaaattggaactccatatctaaggtgatgtgcgaatataggatcatatggataagttgttatccagtgcaatgcctaggttgctactgtcgacaaacagaggacgggggttttatgatgttctaagacttgaagtagctttccttttaaccctagtcagagggtaggtcagttgcttgataggttttacaacagaaattttgtggcttcaataggccacaaaatttgttttcctcattttgcatgttacttggcagaagttgagttgcatgtgtatgagacacaactgcattttgtatgagttgttacccgaacgtcagacatgattttaactcgatttacctgtagttttacgtctgtctccatacttttttattttacatgtagtagcaagttgaatttttattttatttatgcatcagaggtcatccttatcggatacttcaaatgaaaaatacacatttaaattatttttcgtaatatcagttactggcattctatttcagttctttgggcattgcttagttgatatgccgtttcaataaataaaacgtaccatatgaattataatgactttgcaattttaaataagttgttgctttgttgtagtgttctgatcgtataactttacatgctactttttttttgtgcctatcatgaacattcatatcagtctagactgtttaagatactcaattgtgtatcgtaccttacatgttatgtatcattccttgcatgttgcgatcaacttttgagtgtcggacttattgtatgtaagatatctgcgatactgttagatctcattgcctagtttggagtattggagatttccccgattcgatgtaggaatattcatttatttccgtaaaattcatttgttccaattggacccatactttttcttaaaatttactctgtagtttttctgttggataattttgaccttattaatgtgtcactattgaaccttctgtataatcaaggaattcatgtgatttggtatgcttatattcaatatcattttattagcaatcgcaagcgctaggccttattcactctagttggtaagtcctttagtttttcgcatttttgagatatctatgccctttcatcctgggaactgggaagattttgttttgcattttgttgcataaattaactgtagttgttgaatcggtcttcctgtcaggtaaatctggcagactcttctgctagtaaaggggcaaggatacaagaagttgaagctaagtttactcatctgcaggccacatgtaaccgaattacgcaggtatgctataaacaatttggtgttattttgctgcgtaagattgtagtataaggtgatgcaaagtctttcttgagttgtagactactacctaatctgttatccatggagttttactttaattgtacctattccatatgtttgcacagagcaaccgttggttcttatttagtactttcctgtttaggagaaagatctgcttgaaaagcataatctctggcttgacgaggaacttaaagaaaaagtgaagaacttagctgaactaaggaaatcaaacatggatgaggaggctaggatgtcagcaaaggttgccgaggtgagtcctattccaaccttgacatgtgacataatgcaagcagaaagcaaaacctgattatgttggtttcagcttgaaagagagacttctgaatcatccagttccttgaggcgaagcaaagaacgggtttctgaattggagcaaagggtatcatatatggaaaaggtaaattgtcagatttgttagcttttgtattattgccatcatctaatttttgctttgctttgcttttatgatctaaaggagttgtgctcaacaaaggatgctgcagctgctaatgaacaacgcctggctgcagagctttcaactgtatggtttacctttattcccattaacccccccttgtttatttcacccttactgctcccactccctgcttgtttaaattttagaaaggaaatggaagaaaatgtgtgctgagctatttgtactagaccagcagatcagtccatcgttattgtatatgcacacggcacaccacaacttaacccatctagtgtatctaggatatttctttttttttaatggaatgcactgatgttcctctctataagccaagtcgatgacgcttttaattattgccttttgttctgtttcccttaaaaggtcatgaaacttgctgaacttcacaaagaaagttctgaggaatggtcaaaaaaagcgggggaacttgaaggtgttattaaagcattggaggtaatgcctttacttgtatttaattttgccccgctcatgaacatgaaaatctaattattcttattatttttttcggtgtaaaccagacacatttgacccaggttgaagatgaatacaaggaaaagcttgagaaggagacttcagccaagagggaccttgaaatggtatattgattattattttggatggttttcttattgaaaaatcagtttgatattgtgagtttcttagttgatcttttggctttcatgctattcaggaagctacctacttaaagcaaaagcttgaaaagtgtgaatctgatctggagaatacaaggaaatctagtgaattgagcttcactccattggttgcagcagacccttgtgatctagcaggctcaccgatgaaagaaatgtattatttctgaaactttatacttttagtctagcgagatatctaaagcaggcgctattagcatagctaagtaacactttctagagagcattgttcaaggctttttgatattaattgtgttttgctcattaaagcttatcttattgaatgatgttaacttctgtttgtgctgtaccgttgtaaacatgatattatctttgtcccaacaccaatagttcccaaacattttgtagtcattccttattgtgttgataagtcactgatcatatctagctggtgctagggaaaaccatgatatgcaatgttttacaaatcataacagaaacacaggaaggagtatgatccaattattaaacaagaccttaattttcatctattttgaaattctttttgtttcctatttggcagggcattttctgatccagcaaatcagaatgatctaatgattgtaccaaaagtacctactggtgtttctggaactgcattagctgcttctcttcttcgtgatggttggagtgtatgtccaatctcctctatactgtttaatctgtgcatttacgtttcaaatattacctgattaccttcactgtgtcagctcgctaagatctatgagaaataccaagaagctactgatgctttgcgccatgagaggtttggacgaaggcacgcggaagcagttctggagagggtacagttctgttctcgtcagtttatctcttaatttgtattaatctctactctctttcccatgatcccatcatttccactttcctaatagatgttttagacatcaaaagtcaaaacagctttaaatacaaactttcaaccgtgccatattctatctatgtaaccacatggaagtagtccctcctctgagaaggttgaaatgcagatttgctaagttttgattacaaactcaccataatatggatagtcaaaatttcaaataatcggattatacgcattctaaaatgacatttttttgagatggagggagtacatcaattttcgcagatttacatttatttgagatggagggtgaacattaattttcactgatattctccaaggtttcaaatttatgattaatagttgatggtgtgagaagtgtttgtaaagtgcatgaagtaaacgcacatgtagtcctgtatcatattttgtgctaaatgggtaatcgtacttgtgcagggatgctctgttgcttttctcattgattcatttctgaagtgtcctattcctgttggattactgaattatcttttgttcaacaggtcttgcatgaaattgaagagaaagctgagcttatcttggatgaacgaggtaatgtgaaatgcatacattgcttcattgcctgatagtacactgattatgcttaagtttggacatgtatgcaattattttgtgctcaagcatatctttgcatttgaccctttcagctgagcataggaggatggttgaagcttatgctctaatggatcagaagttgcaacaagcattgctggagcatgacaattttgaaaataccattaggaatctaaaggtgcgtacatcaattttctgttaagtatagtagtctcccatagtgaagttttaacaataatcttgtttttgcagtcagagttaaaaaggcgggaacgtgatcatagtattgctcagaaagaaatagatgatctgcaaaaacaagtgagtctttaagcatgacatctgcattttgttctttttgattgattcacagattaaattgtctatgtaaggaaaatagaaatgttaacctcttgcctactctctagatatttaagatctggtgcaacttgatgtgatactagttctcaccaacatcttttcaaggatgctattctaaaaggggtggagtccatttttggcacctaaatatttcttggactctaaatttacgctgaactaaaagatcggttttagttcaccttcaacttttatttataaaaccagacaagtaacacctcatacctgattccatggtggtttagttgagatgacatggttttcactgatgattagcttctattagctgagattaattgatgtttaaccagctatttgacattcgcaccaacacaagcttgcatattaggagtctgcactagcaaaaactattatgatatcaatggaaaccactgtggagcagtgttgaaggtattaatagtatttgtatggttttgaaagtcaaagggtggaaaacactagcttttcaatttgaagttaaaatggacctagaaaagagtccaagagccaaaaatagactatgccctttgaaaatatgtcgatgcttgtggtcctcacctgttcaaatataatttgaaggtggatattcattcttgcatgtcactactgacaagaacattgaatcaacatttcttttgtggtactgcagatgcttttgctaactatatgctgtgtctgccctctaaatatttgcagatagctgtccttttaaaggagtgccaagatatacagcttcgttgtggttctagccttccaaatgtaggagatggtgctctttctacaagcacaagcactggagtgcctgaagttgaaaacaatatccatgagcatgtgagtatgctagtccgttgtattctctttcagtttcactgtgttggtgcttgctttaactgttcgatactgtgtttcagatgacattcaatgatatcaatgggttagtacagcaaaatgtgcaactccggaatcaagttcatttgctctctgctgatcttgataaaagggacatggaactcagggtatatataaagtttgactttgttttttctatagtttcaaatgttttagtttgttcatacatcagtgtcagggcatacttttgtatccaatgacatgagtacgtgatgaaaaatatctcgtttctgtactttccaggagagcttccaaattgagttgaagaagattacagatgatgctgcgtccagggttgagaaagtgatgaaaaaatccgaagaacaagcaataatgattgaatcccttcacagatctgtatgtttttgtattctccttgccacgaagttggaaatcttcgttttgaaaccctgtctgcaaaatttcaattgcatgctgtatgtgataccagtcctaaaatagttctcttttttgtaggtagcgatgtataggaagctgtgtnaagaacaacagaagtcacgttccaatgttgaacacatacccaaaaatttggaaggtttgtccttctgatgttttcagttcaggcaaaatggttaaatgtctaaccatgatggtttcaactgcatgttactgctataagaaataacctacatgtgatggttttattttgttctctagatgatggcagaaaagacctgatggttctatttgaaggatcacaggtaatttttttgatgatggaaggcttattgaggctttagaataccatagatgttgtggtgtcttttttcaaatttcaatctattttgaccaggaggtttcaaggaaagcttatgagcaagtttcagagcgtgccaaaagccttgatgaagagctgactaagttgaggtggtgttttcctccccttttaaatcttattggcatgatagaataacagctacgggaagaagtcatttgaataattttcattccgatgtatcattggacaagatgaatactgattacgaagcaatgtaacaacatccctttgctaaaaaaaaagtaatatgaacgactaaggccctgtttgtttcagcttaaaattattataatctagattattaagacatattactataggctggattataataagccgacatagaataagttgttagttgtttgttgctctagattattagctggttgttaggtgttagcaacccaataatctaaaaaaagcacctttagagtggattactagattatagtaatctggcttatagattgtaataatctatcataataagctatctgtttgtttcaacttactcctaatagtccagattataataatcctaagctgaaacaaacagggcctaaagcattaaggttaactttctatggtcttttcaaactatagaagtttatgtcatgaaaaataatttgcaagcaatccaacgtacttattttacgtagttagtccatatacttttgcaatatgaacgactaaagcgttaaggttaactttctatggtgagctacacttggaaatgcacagatcctatgctggcctacatatgtagacaaagggagtactggagtactatgaaacggatatcttgaaatgttgttagtgcccagctctgttgaggtcgtgtcgttataactaagcatgctgacggaagtgtgaatgtagcactccctccatctgaaaatataacaccttttagcattcaaactttccccacaatataataacttcacctattcactcatctcaaccaatcacaacaatctctcgggtaaatctaatgggcgggtgatcgctgggagcgatcaacccgcccctcccccctatacgctcttcctctcccccttcctcctccccttcttctcttcctactacagtacaccataaattttttaaaaaataaaaaaacaaagttggaaaaatttatgtatagaaatactatatataaaaaacatttgaattcaaattcaaattgaaacgggtatgtaaacttttgacttaaaactttaggtgtataaactttagatgtgtaaacttgaggtgtacaaactttaggtgcataaatttactaaaataggaaagtaatgcggtgccaaaaaaggaaaccacgtggagggagggggggatccgaatcctgatcgctaggggcgcttagcaatctcgcaatctcccacttaatttctcgacctactttctcatctcaactaataacaattttccccatttaatttctcctgctttcttaataccttgtacaactctagaaatccttatattttgtgatggagggagtagtatatagacgcacatctaagttatctgtgtcacggttggtttttaacttaccatgtatctgtgctgttaagggttccatttcttgttggttcttcatttttacatgattttggatggccctacttattgtggtatttggactgttgttgattatgttatattatatttgatcttgcatagaatttctgatcaatactgattactattcattaggactgagcttctatctttgcgttctgagcgtgataaggcggttcttgaagcagaatttgctcgagaacgacttaatggatttacagcagagcttgaacaccaggttctttctttgatgtgttatatcatgatttgttaatatttatgtttgttacactgaaatggacataataatgtccataacagtcttttggaagaagatagcatttattacatgctgtatccttatttactttgtacatgtaaaaaacagaggaaggaagctaattctatttcgctaagaaatgcggaattgatgcatttagtagttgattacgaaaaaagattgcgtgagaactcagaatctatgaaggctgtagaggagaactcacggaagctattaatgnaggtttgttgatatttttacattcctcaaataatattaagacccagagtcctgacatgatttccatttctctagatgtctattctaaagaatgaaaaagagatcttagcaaagtcagagaaaaaagctttggaggaagttcatgatttgaccacgagggtgcatcgcctgcaggtatttcccttgctgccatatcttttcattactttggagtttcaatattgtcttgtaccccctccatccaataaaaaaagcgtgtccatgatcgtagctagggttggtctttttttgggacggagtagtatgtattgcagtttctgttagtttgttatgtttccaaaacagttgtaaaactgttatcgtcaattatattctatacttatgaatatatactccttctgtcccaaaaagaattaatttctaggtaagaatctgggcatagactatatgtccagattcatagtcagaaattggttcttgttgggacagagggagtatattattgttatgctctttttgaaaggataatttagtacttttcgtagctctgccctatatttctcatgacaaatttggagctgtcagtttcgcacaactgtatggtctactcaagcatgaacaagcaagatcttttagctatttgtgtttttaatttgcgatctcaaataagttaaatgttcgtgaaacaaataaaacatgtcaattactttgtcttgaggcttttataaacttgcactgacttgtatatatgatgcattgcaggcgaccattgacacaatacatgccaccgaggaggttcaagaggtacaatatgtctagatgagtcacattaatacttgaaattcttctctgtctatctcttaatctgtgaataatttagaatgcaaggtctattgaaaggagaaatcaagaggagtacatcaagagactagaagtaagactcctatttggcatcacatatgctttagtattttgtgcttatgtagcttcgtcattgcctctcctctcacattcaagctgttcttagctttaaaatgtaatttcctgtactgataccttgaacattgagaatactactgtgactctgtgagatttgttctctttctgcatgctcattgtggggatatattgctccatgtattccttctgtatcttatcttggttgagcttattctaatttgaaatgcatccatagagggactgggctgaagtgaaaaaagagcttcaagagcaaagggatcatgtccgcgtcctgacgcttgataagaaaaatgcctttgacggatgtctgaagcaggtagaggatatgagaaaagagttacaaaattcatggaaagctgctactgatgctgaatctagggctgctgttgcagaggtttgttcaagtaattcatttttctatagttaatcgcaaacatattatctaactggtaactattttgacatttctgtaggcaaagtgttctgatntggagacaaaactaaaatcaagaaaggtagatacttataaaactaatacactgttatattgtatatctaatacaatgatgttgaaagcaccatacatcataaaactgtctgtatgtaatttcctattgataatctctcgcaattcctggttttgtcatgagtaaatgattttcggtacaattatttctaagctgtttaatagtctgttctgtaaaggaagcacatgatttcagctgaattacataatcttcatatctttgtacgattgtcaaattctgctttggatgttgtctgatcattgaaatagtcatatcgtttttaattgaaatgtcattcatggatatccatgaaaaatagtggaatgatgcatcacgtttagttttagcattagtgcatgtttaaaattttctttacaaatcaacatcaaatttgttgtctatattatccgtttgtagggagctaatttcattgctcttgttaattagctataggtgtacactgcatctaaatatctctgtactttctaccttctctcctatatactgtatcacccttaattgagctggtgtaacaattctgattataattatgcattcacgcggtaacttgtaaagcatccatggatgcgtgtagttgctgtacaatttgttcattaccatgattgaattgagtagcatgtttctttgatgaaagcatggatattctggtaaatgtactttatttcttgggcattgatctgaaacaaaattaatcctacaaaagcaaatggtgggagtacaactaaaagcatgtagtattcttaataccttttcattgtattgtacatgctatttagctttcagctgactgctgttattctgctagaccatttttagggatggtggtcgtgatatcttatcagcaactgaggtgagctagttttttcctgctatttggacaatatcatatgcttctacatattttatatggttaaagatcctatggtcttaaaatttctggataatttcaatgctcagttgttaaaaatttgccctgtaggagaatgatgagcttttccagctgaaagaggagttggaaaagtacaaagaggaagctcaagcaaataaaagctacatgcttcaggtcagtttgccccatcaccttgaaaggctaaattgtttaattacattgtggagtcatcaagctcttttaccattagaaacattgtcactagctacatttattagtttatcatttgacatcaccaaggagtaatattctgaatttcctcaacaactatctatcgctgtgcacaagagatattttaggtttggcactcccattagagaaagattacccctttacttataggaagttattgttcatggtgatagtgacatcaccattagggagcagatgctgacccttgagaagttgaggttgtagccatcccatccctcttgcttaatacatatcttgtaagcctgacgaggttatgatcaatcattctgaggtcaagtcgatgccatgctggatgcaactttgataattttgttcccctaattgatcaccttagctcataatatgcaacagttttctagttatctatgatcggtgtggtccatggagctggtttgaagtggattaattattttgtcattctttgctcctttttcactcaatgattctatgcattacaccaatttctgaaatgctagtgatatacagatcatatccatatctggtattctggttccaagcatgagaggaccgtgcaacataaacaacaatggattgttatgataatgaagatgtgatgtaatagagttattttcctctcttgaaggcccatgcatgaataatatatctagcatagccacctttgtcataatcagaaagcacaccatatttccttttgaaaggtcattataatggcttagttgttctgtagagtaggtgaactgaattcattggtgcttgcgtagtgtggcctgtgtttctattttgccttgtagaagtcaattatttgctgacctctttaagtcatattataactctaattacttgacagtacaaagaaattgcaaactcaaatgaatctgcattgaagcaaatggagtctgcacttcaggatttcaaaaccgaggtactgaaatgctttctgtatccttatctacctatgcttgatatttacatgaatttctatttaattttcagtctgagactatcaagaaaagcttggaagatgagattacaaagttgaggaccaagatatctgaactggagaagtgttatataatgaagtgtgaagaagctgccagtgcaattgaagctaaagagaaggataccacttctctcatgaaggaaatctcagttttgagaaatgaagtttccgagaaagtgtaagcaatttatataccctatagaggcaggcatatgcttttctcaatttggagatgcttcttcgattgatgttatctcttttattttctcattcctcaaaacagaatacagattgaaaaattagaaactgaactggcttcctcgaagagggctcttgacgagcagtataagcgttggcgtagcgctcaggacaactatgagcgtcaggtactttggggcactaacaattttgtcaaacaacacataatgttattatgctttctacttatatcttggtgcttgcggtgctgatgcttcattacaattgatgtgcaatcacaacttgcagtgatactaatgttatatggagcatgttgctaaatgttttcaccattttacttgaactgtagctgctattctaggctactataaaagacaccagtggtggtggtggctgcaccttttacaaactagtccctgataatttcagatattatgcgagtctaatatttgtttgaatcaagtcaataccatatattcaaataaggaaacaagtaatactagcatatttgttaaaaaaatattttgtctatgacatatactttcttttacccatagcaaagcatggtcattttgctagtgtatgcaacttagttcatagcatcaccatcaaagatcagatggcatgtacatgatacaataaagtaactgaagtatatcaagttcagattgatttatccttcttacttattacttgcaattcttataatgaatctccttggtgtttatatacaattattttttttgtacatactgtgttatcctagaatgaggctgtgaaagcacttattgtgtgtgtgtgtgtgtgtgtatctcttctgtatcttctgtaggttattctgcaatcggaaacaatacaggagctgacaagtgcttctaaggagctatcttctttgcagcaggaaatcatagtgcttcgtcaaacagtagaaacacagaaggctgaaaatgtaaattaaaactgctccactgaccctcttgtctgaacttctattcatttggcgtgtaagagtagaagtctttgtgtcttggacagatctaaagggatgtgttatttgtggctgaactacccttaaattaggagaaataaaccttaccagctaatgcttaatttatgacgctaggtctgctaggtgtggcgttacacgcttctgtggtgcttgccccagttgtcatagcctcacattttagctaaagtgttgtgcttgatctggctgctgcaagccccaggcaaggaaccaaataacgtcaagaagtcttttaaaagttacaccttgtaccttcccacttgttgatccaacctttttgtggataaaaatggtcttatggcatctaaaattcaaagcacacagattagcgattaccactagttctttgctggtgttcaataaaacctttgcaatttttgacaaatcgggtgaatcagtcgaggaatagttcaatgtgtctacctttctgatatttctattctgtgcataacagcagtaatctggctatacctatactacttatgttgcttttggaatagattcatgattagtgataacttatcctgatcgagctgttcataggaactaatcatcatttgttgtaactaatcgacactgcaaatactttttcaggatggtctaagaacccttggagagcnagaaaagatagagctggtgaaaggaaaggatgaggccttgcagaaatacaatgagctaaatgatcaggtttaaaagcttgtagctatcgatatccagttattcttaaaacattcacgtttttagaatgttatctgatctccatgtttcactaccaagagcaaaagtgggattttacaaacctaagggagctgcttatatagcattgacattaaacaactcaaacatgaaacaaaatcctggcaatagcaacaaaagaaaaagggtggatactccagagacttcacatcctgattgttgttccttccttccagccatgactgaacctcactttcgacttgttctagtagctttgctccacctgctgcgcgcttctgttttcttctgacttctgcaagaagtaccagttagtaacccagaaactaacaggaaaactcatttcaaatagccccactaaatggctgaaatccccgcgacaaagtatctgctttctgttttgaaatggaatacccatttctctttaaagaataaaatgaaacacccattcttctagcacctgcagcacatatcgaagaatattgttaaaaccacgggaacagcttaagacacccccatttttggcatttatgatcttttccaatccttttctacacagcgatctttggttatatactctttttagcgttaacaaaacacaaattttgatttgagaggaatcctgattttccacaaaatattgtgtgcaaattccactactatcaattccaaccacaatttcggaattactgggattagtttggcataggaaccagaattgattggtttgattactataatgcttaattgattatgggatgggtgtcgaatttatggacttctacatgcacattttgaggggtatgtattttatacctacctattgagaacatacatatgaatattttttaatgatacaaataaaatttaataaggcacttgtctacatggtgctttacactagggtttcatgggcttattttttgttttttttaacatgcttgataactattttcataacagttgcctgtttcgactttcgagccttaatataaacactgccttacaaaatcagtatatcactacagtaactgattgtactagtatatgcttaattcgttggcaagataatgctggattaatcttgtttttctggtctaaaagatgttcagcatatttaaaccataatctagaatggttactggttgtagttggttgccattcatattttttgtttgcttccattgcatgtccttccgttctgtatataaacacgggtggtcgttagttgccattcgtgaagatcacatgaatatacattcttgctattttctgtacttgatgacagtgggttaccatgaatcacatattttcttcaaatgctgaatgcagaataaaattctacacaatcaactagaagctttgcacattagattagctgaaaaagaacgcaatattgctggtctttcatcgcaacgcattgattcacatggtgaagatgatttgcatagcgtcattggctacctgcgcagatcgaaagaaatagtgagtataagattcagtgtcctcttcttctttattattcctctacttggaatgggatgttatttatgtagtctgatggtaatttcactatttcaggcagaaaccgagatatctttgcttaaacaggagaagtcacggcttcagatagaagtatgatctgcttgctcttgcatattgttatttgttcaaatacccataattgtgccacgtcaactactgtactcctccatccacaaaagttacacattttacttttgtcaccaagaccatgaagaaattaaattatcttggatgctacaacatcaaggagtgaatgcaagcatgcaaccaatgagtatttagatgactacttgggttctcatcaaacatttaatttatctcttcatttaagtcttaaatacataaagattacaaataggtacaacttatttggaaaaactcaaatgtgaaatatgtctaacttttgtggatggagtaaaacagaactctacctatgcttacttgaattgtatgtaattataaaggaactgttctgtttcttttgttttatgtagtatggtgactgcgaatattgaactgccacctgccagactttgttgttttgtcattttgttccatgctcccatttaatctgcccataggacaattccatgaagtttccactgtttgacccatcatatttggcatttggtatcatcatggaaccaatccatatggccttgtctcctttgtgtgattgcttgccaagcttgtctcatttaacttgatcctatggctccactctggtcttgtatgaacatgtcatgtgcctctgtactttcaacacataactgaaagttatgcattattgttcaatctgtttgtcttgcatgatttgagaacttgttttcactcctcattttgactatatgatttcctattatgtgtttttgtctgatgtagttttatctgtgtgccttccatgatattagaaccgtttccgtgcttgattttgtgggggcagcttaaggtgtttctaatctgctataatttttttcatgcttatatagttggaaagtgcattgaagtccacaaaggaggcacaggacttgctccgcagtcaaactgatagtgcaagaacatcaatgctcaaggatgaagaattcaagtcactgcaattccaggtgccattcttgtcgactccctcctcaaaatatcgctatttctagtgcttaaattttgtcccagaatatagctatttctatagtcctactttccccaccaaacactcgtctgcttttcactcacctccattcctccaactatccctcatttatttatttatttatttatttattttttgggggggggggcatcatagtcttttccgttgatcgttaaatctctccaaaaaagccacaagttatattttagggcggagagtgtattgggtatctgtcatgactgctccctttctcttgattttactgttgctctcttattccttttttgtagcttgttttcttttgtattaaaaatgctttacctcaggtgagagagcttaatttgcttcgtgaaagcaatatacagcttagagaggagaacaagcataatttcgaagaatgccaggtaagtttattgatgttgtcttgtttatttcttttatggtgcatgttttgatgtgcttcattgttctttttttttctctcctgggttcagaaattccatgatgaggctcaaaaggctaaaatggaagctgaaaggttgcataatcttttactggaaaagcaggtagatgctgaaatatgtaaaaaagaaatagagatgcagaagaccgaaatagctaatctaaatcaaaagatttccgaggtatgttatttacccattatcattatgcaacgcatcatgaatataattggtttatttatatgcggttagcatttccttaaggtagctgacatttgatacatgaccttttctaataaataataaataagaattaaaatatagcactgtagcagctaatgttgtactagtacattagatagagaccatgccaggtcaaaaaatattttcttgaactggaggaagcaaaccctcaaatgctgatgctagttttttttaggaaacttacatctaagctaggcagcgcttgtgtggaaatgtgcgtttgtgtacatctgacttgatattcttggtgctacttgtgtcttcactttctgtcattggttttgttatgaatggagggactttaggattagttgcccagtgcatgtgcacagaaaagggtgtctgaacagcagaccggtgtgccggtgtgtacatcgagcaggggttcttgcattgtgtataaattcagtttatgttttacctcttcatcagttagtcttgaatagaatttgtctagtgtttcccaaagttctaacattattattaacattgttataagcttgctattatcattgttctatcaggtattttgttttgactcttatgtcaactttattcttctgcagttggttgaaaatagtagaggcgttgatttgagcacatatgagaccatgaaggatgaacttcaaaacataaaagttagtggttttttttattatttttatcttttcaaatcattttgataagtatttttagttattatgttatacttattcttttggtgattgaatttggtctgaacatattttttgttctataaattgtactctgatccaagatataagaacttctggtattcttggggattaaggaaagaggtgaaattgaattggggatggttgcgattagttgagatgaggaaacaagtagagaaattagatgagaaatggttgtgattagttgggatgggggagtaggtgaagttgctatattttgggacattgagagtactgataaaataatactacatttgttcttttgtatgctggtttgactagagatcaactgtttaatgaagcattcggttctgaacctagttcaagcttggaatcagatagctacggtaaagaatagggaaaatgaccattggtgagacaattagagggaggggacagacaatatagtctggaataagaacttttgaagcgaaacatactttctaattattatcggctatcgctggtattggacttgttatgccctttcatgcgcatatgctgctcgttttctaattattgatggcagttgagttagtttcccacttttctcaacttctaatcgctcgttttccacacgcacacttttcaaactgctaaacagtgtgtttttgaaaaaaaaacatatatatcgattttcaactttttttttaaataatacttaattaatcatgctctaatgagtagcccagttttccatgcaggagggataagttctcaacctgtattaacgaacacagccttagtgatatataacactgatactgatgtacatcccttaattagcatggatggctggcttaaatttcattatttggtcaatacgactgaacttaatgagtttgtaaggttgagttttgtgataaacgattatcacatgtatttcttaaatacaacaggcaaccttgagagagaattcggcagagctagagcgcacaaaaaaacttctttctgagaaggattctgtaataagaaatttggaggaaaagcttgctggatgtcagtctgaattggatgctagggaaaagaagctgaatgatgntgaggtctgatataatttccagtaacattctcctggccatttttactttagttgtattagtaatgcctttccttttgcaggctagccttaaatctgaaattgacagacataggaagattaatatcaacataaaggttaggatctttcccttgttcttctattgcaagatcgaaagttcattgctgttttcatgtgcttatatcatcctattaaataatgtagaggaagcttgatgcatcagcaaaagagaaggaggaactgacgaaagaaaaacaaagcctttcaaagcaattggaagatctcaaatcaagtacttaattaatcttattactttcacacaaccacctgaattatatattttgtatgatcactcatgttttaaatttgatatactttagcaggtcagaaaactacaacagaaaattcaaatgaacaggccatcaaagaaaaggacttcaggatacaggtcaggaggttgtgatttttatgaacatgaactccttcaggtttcttacataaacatatattaacagacattggaaaaagtcttggagaaagagagagatgataataagaaagaaaaagcattccgcagaaggaatgagaaagtatttactaccgccattcaaaatatgaatcaggtatttcttcctcaactagcctgagtacagtcttgtcttaaaaatttttttgtttatcgtcagttgggtttagattgagcaccaaatttatcatggaactactgatttaatacagattgtcacaaagctacacattaagtagcaaatttgtcacaaagctactggtttattgccaatttaatcccaaaactacaacgtctatatcttcaacataactgtagtgctagggattgaaaatctaaaatctgtagtttttttataacttgagcaataaatctgtagttttgtgatacttctccctaaatctgtacctgatagctttgggggagtggattctaatcccttgaggggatgtcccgtcgtgtacctttttctttcaaattcgatacaaatagttgtaaaaatttatgaaaaaaattcgacctactatttatatctctcgacgtgtgcgttgcgtttggacctaagattttatggagttgtatacttatgttgtatgagtgttgtcgatcttttccagaatttttcataaccatttggatggtttttaagcaaacaaggggacatccctcgagggatcaaaatagtttccctagttttggcactaaatgtatagttttgtgatttgtcttaaatccgtagtttgtgaaattttctccttttttttaaccgatgcagtagattttctaataagaaaagccaaggaagtagacattaagataatgaaagattgatatgttgacatgttcacagatgaacttagaaaaatgaaaaacttaatgtgttctgggatatacaagatgaaacttttaagtaggatgttttagtgtattctagagttggaaagttggcatcattatgaatgttctaaagaataagtgccattttaaaccttaccaaaaaattggcaagccaaattttggtaaagtttgagtgtttggtttataaccaagtttttgtcaatgttgcttgtgatgtattgattgtttttgccaaaatattggcaacacaaaatctatggcaacaaaccaaacacacacattttcttgcccttgccaatttttttgtatagtttgtttgggctataaaccaaatgctaagtgttcatgtccattgccaaaccaaccctgagtattaagcctatcattatgatctacacttttcgttacattttcttctattgaatgatttcttagaatatgaaatttcactgtttaaagcttgcaaatgtagcatcatttgagtttgctaatggttaatgtttagcatgatcacaggcaattatagtacactatagtaaattattgtctggggtttgcttattggcttttcaggccatgtcccattcctgtgatagcccttaatgatcagttagcatgcattgcagcttgctccaacctgtttccttagtatttactcgtatttgttacctaatgatacatgatgtgtacctattaaaaatgcaacataacaacttcatagttgcttgtttctccaataattaatctgtcctgcctggttagtgtgtggtatatgcgcaccctctaatccacttgttgctttcgaaaattaattgcaggaaaggaaacaagtagaggaatcaattgagaagcataggcaggctgtgaaagaggtgattgaggtacagtttatctgctcccatagatttcatgtttcattattgctgctgcaaatgaaagttcctagtatattttatttagagctttgctacagctgatgtgcgttctctgcagcattatactggaatatcctctcaaatcccatctggatctgcaatcgatgagcagctgcgttcatatttccttgccatcaaagctgttgaggagtctccgagtcccttccaagatggtgcagcaagccagacaccatctgttgaaagtgccgatgtggatgcatctgcagctactgcaggttcctttctgttcaatttttcattccacgctgctagtgtatatttaatgatctctattagttaatcatagtatctgttaatgacatgtgatacttactagttcagaaattatattagatctgatctattacatgtactcttgaactcgatgtgaatttggttttgaatgatttggcatgtcagatattgttcggacttcggaatgtgatatgatattggatttctaatgcatcattttcttgcattggttccatcgcgtggatctgaataatgtgtttttcctttgctttaccgtcacttgatcaatatggtagttcataaggctgctgcttttttttttttctaatctcagggagacaggtagctactccaccaaggcctgctcaagttaaagtggtggaggagagagcagtttctactttgcccaaaccaagcactgaagtacgtagaccaggaggaaggagaccacttgttcgaccttcacttgaacgagttgaagaaccccaagctgatattgatacaacagtagttgaaggttccacagagaaaggcggcttgttgatggagcgtgaaactcctggtggtgtatctgcgttacagccatcaagtcgtaaacgtctaattccatcaccacaaacgagagatgatgcttcacaaggagagacaacggatgccaatccaccactgaagaaacccaaagaaggatcttcacaatgtactagtgagctaaaaactgaacagtcacctcatgaagatgtcatggcacctgttcctgtgctaccatctacagagttagatgagcaacagcctggagaagagatggacaccgatcagtcttccttgccagttgaagaggttgaggaaacaagggaggatgacttgggtgataaggatgacatggaaacacatatagacgcttcantggacatccaaggacaagatgcagaaactggtattgataatgatgcaactactgtggaagatgtgccagtcaagtcagaagcggttatggaatcactggaggaagacctgaaaactgaggatgggaaggaagagggtcagtttactgcaaccactgatgttgaagatgagagggaggagggagagttgccagatgaaccagaacaaccagacagcactccccctgtgctggatgttggtgagcaagccggtgattctttcagggcggcatctccagcaggaccaactgaaaagagtgatgttgacatgccagaagaaactggagaaggtgatggtaccatggaatcagaccaaagccctgtaccacaatctggtggagcagatgcgtcaccgagccaaatggctgatgcgtcaccaagccctgcacgtgaaccttctcctaacccagtccaagctggtgcacctcctgaacagcagaatcccacccctcctaacccagtccaagctggtgcatcttctgaacagcagaatcccgccactgcagcagaaggtgttgaaactcgtagtaccagaacaatcaacctaactgagagagcgaggcaaaaccggcaagccaggattcttcgctcagccactcaacagaatgcaaggggccgtggcaaccagtctcttacatacagggtatggttttatactacaagactactgagtttatttctgttgtgttctatttttgttatatccagtgttaattctgatggagaacaatgttttctatgtgcagaaagatggcggccgaggaacacggggtcgtggtgggcgtggtcagtcgtagagaatttaggtttgtctttgctcaagcgcggagactagttttttgcaaaggacatactgaatcagggcggcatcatattcattttgtagcactatcagaattgcgagcgtacatgttactctgcttagacaaattcatgtggctaagcagcgcttattaaaatgttctcattgcccgtgcggattgccagatgacctatatttaaattgaactctagttgacaaagatgatataagcattcgtagcgcgtaagctgatttttatttttctttttgattcgctgcgtaagttgatactgagttgtaaatgcgtacaaggtttgctaacgaatgtcggttataatttgactgtagaaaactgaacatttctgaatgttagtcggagtaaatgattttgaaccggacgataataagatgaaggctacagtttcacgattgctcatagctaagcagagctagtagactcggggtcaaaagatgaatagattaaagccaataattagatctgaacaatgaaaaatagcctataatcccctacatttgagataagtttgcacccaggatctacaaaagccgcgtcgatctacagcctctagtttggttgtaaaagtaaaatcggatgagacgagccagacacatcagtgtattattaataaatcgaagttctctttcaaaaaaaatccaagttttttttaaaagcatggcaaaagaattttgcctaatatatttatggagtggaagattgataataaatcaaaagattacatcagcaaagaatacattaggagaatttgcatacatgtttcattctgcgctaacaactgggacaacgactttgctactatcattctgttcgattagctatatatattctaatgtacagaagtaacaggccgaggccgtccagtaacgttcacttttttgtgctttaaagaatgggaaacagtataatctccacagaaaaaaaaaagctaataaacccccagccacaagccgcagtagccagccatactgcaagttcttctcctgcatgatacggcctccactccacagtcatcatcggtcctgcatctgtgggtaggtaacacgtctggtacatggcatgcactctcccacggggagccaacgctttgccggaaaatcgtttctggacaaacttgagacgacaatgcgctcacacggaagggttggctgtcatcctgaagataagtttttggtatcattgttcatgcaagtaaggaggaactgggaaca

SEQ ID NO: 8 - protein, 2050 aa, Oryza sativa
MPLFMSEEELRLLGGDVAAVAERADAAIRELRQQVDTVRAEADAAAIAAEQTCALLEQRYDTLSAEADRFRAELAELAAASERRAADLASSQSEIHQLRIQAIAKDGEIERLKVEISEVHKSKSQSLELIEQRDAEIREKDGIIQNYLDKIVNLADSSASKGARIQEVEAKFTHLQATCNRITQEKDLLEKHNLWLDEELKEKVKNLAELRKSNMDEEARMSAKVAELERETSESSSSLRRSKERVSELEQRVSYMEKELCSTKDAAAANEQRLAAELSTVMKLAELHKESSEEWSKKAGELEGVIKALETHLTQVEDEYKEKLEKETSAKRDLEMEATYLKQKLEKCESDLENTRKSSELSFTPLVAADPCDLAGSPMKEMAFSDPANQNDLMIVPKVPTGVSGTALAASLLRDGWSLAKIYEKYQEATDALRHERFGRRHAEAVLERVLHEIEEKAELILDERAEHRRMVEAYALMDQKLQQALLEHDNFENTIRNLKSELKRRERDHSIAQKEIDDLQKQIKLSIYLTFAPTQACILGVCTSKNYYDINGNHCGAVLKIAVLLKECQDIQLRCGSSLPNVGDGALSTSTSTGVPEVENNIHEHMTFNDINGLVQQNVQLRNQVHLLSADLDKRDMELRESFQIELKKITDDAASRVEKVMKKSEEQAIMIESLHRSVAMYRKLCEEQQKSRSNVEHIPKNLEDDGRKDLMVLFEGSQEVSRKAYEQVSERAKSLDEELTKLRTELLSLRSERDKAVLEAEFARERLNGFTAELEHQRKEANSISLRNAELMHLVVDYEKRLRENSESMKAVEENSRKLLMEMSILKNEKEILAKSEKKALEEVHDLTTRVHRLQATIDTIHATEEVQENARSIERRNQEEYIKRLERDWAEVKKELQEQRDHVRVLTLDKKNAFDGCLKQVEDMRKELQNSWKAATDAESRAAVAEAKCSDLETKLKSRKENDELFQLKEELEKYKEEAQANKSYMLQYKEIANSNESALKQMESALQDFKTESETIKKSLEDEITKLRTKISELEKCYIMKCEEAASAIEAKEKDTTSLMKEISVLRNEVSEKVIQIEKLETELASSKRALDEQYKRWRSAQDNYERQVILQSETIQELTSASKELSSLQQEIIVLRQTVETQKAENDGLRTLGEQEKIELVKGKDEALQKYNELNDQNKILHNQLEALHIRLAEKERNIAGLSSQRIDSHGEDDLHSVIGYLRRSKEILESALKSTKEAQDLLRSQTDSARTSMLKDEEFKSLQFQLVFFCIKNALPQVRELNLLRESNIQLREENKHNFEECQKFHDEAQKAKMEAERLHNLLLEKQVDAEICKKEIEMQKTEIANLNQKISELVENSRGVDLSTYETMKDELQNIKATLRENSAELERTKKLLSEKDSVIRNLEEKLAGCQSELDAREKKLNDVEASLKSEIDRHRKININIKRKLDASAKEKEELTKEKQSLSKQLEDLKSSQKTTTENSNEQAIKEKDFRIQTLEKVLEKERDDNKKEKAFRRRNEKVFTTAIQNMNQERKQVEESIEKHRQAVKEVIEHYTGISSQIPSGSAIDEQLRSYFLAIKAVEESPSPFQDGAASQTPSVESADVDASAATAGRQVATPPRPAQVKVVEERAVSTLPKPSTEVRRPGGRRPLVRPSLERVEEPQADIDTTVVEGSTEKGGLLMERETPGGVSALQPSSRKRLIPSPQTRDDASQGETTDANPPLKKPKEGSSQCTSELKTEQSPHEDVMAPVPVLPSTELDEQQPGEEMDTDQSSLPVEEVEETREDDLGDKDDMETHIDASMDIQGQDAETGIDNDATTVEDVPVKSEAVMESLEEDLKTEDGKEEGQFTATTDVEDEREEGELPDEPEQPDSTPPVLDVGEQAGDSFRAASPAGPTEKSDVDMPEETGEGDGTMESDQSPVPQSGGADASPSQMADASPSPAREPSPNPVQAGAPPEQQNPTPPNPVQAGASSEQQNPATAAEGVETRSTRTINLTERARQNRQARILRSATQQNARGRGNQSLTYRKDGGRGTRGRGGRGQS

SEQ ID NO: 9 - DNA, 6589 bp, Arabidopsis thaliana
aacaacgacgtttaattgacgcctggggttttctgtctccggcatagcataatttttcgtcctcccgaagcgctttttcatcttcctttgttctgggtttctctccaaaaatcgccggagaaattcaaatcgtcatctctaattcgtcggagaatccaccgttaggtatataaacacggtttgtttctgaaattagggtacgaaaaaatgcccttgtttatgcctgacgaagagctggcgcggctatctagcgacgccgcgtcggtggttgcggagagagccgacgagtacatacgaaagatatacgccgagctggatagtgttcgagccaaggctgacgctgcttccatcacggcggagcagacgtgttcgcttctcgagcagaagtacctctcgctgtctcaggatttctcttcccttgaatctcagaacgcgaagcttcagtctgatttcgatgatcgtttagctgagcttgcacagtctcaagcgcagaagcaccagcttcatttgcaatcgattgagaaggatggagaggtagagaggatgtcgacggagatgtcagagcttcataagtctaagaggcaactgatggagttattggagcagaaagatgccgagattagcgagaagaattccactatcaagagctacttagataaaattgttaagctgacggatactagttcggagaaggaagcccgactagctgaagccaccgcagaattggcccgttctcaagctatgtgtagtcggttatctcaggagaaagaactcactgaaaggcatgccaaatggctagatgaggagttgacagccaaagtcgacagttacgctgaactccgtagaaggcattctgatcttgaatctgaaatgtcagcaaagcttgtagatgttgagaaaaattatattgagtgctctagttcgttaaattggcataaggaaagattgagggagctcgaaacgaaaatcggttcattacaagaggacctcagctcttgcaaagatgcagcaacgaccactgaagagcaatacactgctgaacttttcactgcgaacaagcttgttgatctgtacaaggaaagttccgaggaatggtctagaaaggctggtgaacttgagggtgttattaaggccttagaggcacgcttgagccaagtcgagagtagttacaaggagagacttgataaagaagtgtctacaaaacagctgttagagaaggagaacggagaccttaaacaaaaacttgagaagtgtgaagcagaaattgagaaaactaggaaaacagatgagctaaatctgatacctttcagcaatttcacaagacgggttgacaattctgggaccagcaacatgatagaggaaagccaagcagttatttctaaggttcctgctggtgtgtcaggaactgcactagcagcttcactcttacgtgatggatggagtctggccaaaatttatgagaagtatcaggaggctgttgatgccatgaggcatgagcaattaggtagaaaggaagctgagatgatacttcaacgggtgttatccgaattagaagagaaagccggatttatccaagaagaaagaggggagtatgagagggtggttgaagcttattgtctagttaatcaaaaactccaggattctgtatctgaacaatcaaatatggagaagttcattatggagctaaaggctgacttgaggagacgggaacgtgaaaacacactattgcagaaagatatatctgacctacagaaacaggttacgatactactgaaggaatgtcgtgacgtccaacttcgatgtggagctgccagggatgatgatgaagatgattatcctctgctctctgatgtggagatggaaatggaatctgaagctgataaaatcatttctgagcatcttctaaagttcaaagatataaatggactagttgagcagaatgttaagctgagaaaccttgttcgtagtctttcagagcagattgaaagtagggaaacagagctgaaggaaacgtttgaggtagacctgaagaataagactgatgaagcttctgccaaggtagctaccgtgctaaaaagagctgaagagcagggacaaatgattgaatccctgcacacatctgttgcaatgtataagcggttatatgaagaggaacagaaacttcattcatctgattctcgttcttcagatttgtctccagctgtagtgccaggaaggaagaacttcttacatctgcttgaggattcagaggaagctactaaaagagcccaagaaaaagcttttgaacgcatccggattctcgaagaagattttgcgaaggctaggagtgaagtaattgcaataaggtctgaacgggataagttggcgatggaggcaaattttgctagggaaaaattagagggcatcatgaaagaatctgaacgcaagagagaagaaatgaatagcgttttggcaagaaacatagagttctcacagctaatcattgaccaccagaggaaattgcgcgagagctccgagtctctgcacgcagcggaagagatctccagaaaattatctatggaggtctcagttctaaaacaagaaaaagagctgttatcaaatgctgaaaaaagagcgtctgatgaagtctctgctctatctcaaagagtttaccgtcttcaggctaccttggatactgtacaaagtacagaggaagttcgtgaggaaacaagagctgccgagagaaggaaacaagaggagcatattaagcaacttcagagagaatgggctgaagccaaaaaagaattgcaagaagaaaggagcaatgcacgggattttacttcggaccggaatcaaactttgaacaatgctgtaatgcaggtagaagaaatgggaaaagaattggctaatgccttgaaggctgtctcagtggcagagtccagggcttctgtcgctgaggctagactttctgatttggagaagaagatacgatcttcagatcctaagactcttgatatggatagtggtggaattgtctctctttcggataaggaggctgctcttgttattattctggatgttgtacataagattcaggcaggatttaggataggatctgcaatgtccatcgaactgcgtaccgcaaaggaagaaattgaaaaattgaggggagaagtagaatctagtaaaagccacatgctccagtacaagagtatagctcaggtgaatgaaactgcattaaagcagatggagtctgctcatgagaacttcagacttgaggctgaaaagagacaacgatcattggaagcagaacttgtttctcttagggagagggtgtcagaacttgaaaacgactgtattcagaaatccgagcaactagccactgctgctgcaggaaaagaagatgctcttctatcagcatcggctgaaattgcaagtctgagagaagaaaacttagttaaaaagtcccaaattgaagcaatgaatatccaaatgtccactttgaagaatgacctggagactgaacatgagaaatggcgtgttgctcagagaaattatgaaagacaggttattctgctgtctgaaactattcaggagcttacgaaaacatcacaagccttagcagcccttcaagaggaggcatctgaactacgtaaattggctgatgcacggggaattgaaaattctgagcttaatgccaagtggagtgaagagaaattgatgctagagcagcaaaagaatctggctgagaaaaagtatcatgaacttaatgaacagaacaaattactccatagcagacttgaagctaagcatcttaactcggctgagaagaacagccgttctggcacaatatcatctggaagcactgactcggatcaccttgaagattcgggtttgcaaagagtagttcattatctacgcagaaccaaggaaatagctgaaacagagatctcactaatgagacaggagaaacttcggttgcagtcgcaacttgagagtgcattgaagatggcagaatctgcccggggttcacttactgctgagcgcgccagtacgagagcctcattattgaccgacgatggaatcaaatctcttcagcttcaggttagtgagatgaacttgctccgtgaaagcaacatgcaactcagggaggaaaacaaacacaattttgagaagtgtcaggaaatgcgtgaggtagctcaaaaggctaggatggaatctgaaaatttcgaaaatctattaaagacaaagcaaacagagttggacttgtgtatgaaagagatggaaaagctaaggatggagacagatcttcacaaaaagagggttgatgagttgcgggagacatacagaaacattgatattgctgactacaaccgcctcaaagatgaagtgcggcaattagaggagaaactgaaagcaaaagatgctcatgctgaagattgtaagaaagttctgttagagaagcagaataagatatctcttttggagaaggagctaactaactgcaaaaaagatctgagtgagagggagaagaggctagatgatgctcagcaagcacaggctactatgcagtcagagttcaataagcagaaacaagagttagagaagaacaagaaaattcactatactctgaatatgaccaagagaaaatacgaaaaagagaaggatgaattgagcaaacaaaaccagtcactcgctaaacagttggaagaagccaaagaagaggctggaaagagaacaacaacagatgctgtggtggagcagtccgttaaggagagagaggaaaaagaaaaaagaattcagattttggataagtatgttcatcaactgaaagacgaggtaaggaaaaaaaccgaagatttgaagaaaaaggatgaggagttaactaaagagagatcagaacgcaagtctgttgagaaggaagttggagactccttgaccaaaattaaaaaggagaaaacaaaagtggacgaagagcttgctaagctcgagaggtatcagacagcattgacccatctctctgaagaactggaaaaattgaagcacgcggatggcaatctccctgagggtacttcagctgtccaggttctatctggaagcatactgaatgaccaagccgctgcttacgtgtcagctgtagagtactttgaacgtgtggctcgttctattgccagcaattctcaagtcagcactaagcctactgatatggtgactgaaccttcctctggcattcctgctgctgagccttcaaccatgacgagagtcccttcttcaacacctttaataaaatctccggtggcaactacccagcagctacccaaagtagcgtcagacaacaaagagaagagattgatttcacagaaaccaagcactgagttccgtagaccaagtggtaggaggattgttcgtccccaacttgtcaaacctgaggaatctcccaaagttgatgttgatatgccagaagctgagggaactggtgatgaaggaaaacagcctgcagcccatgaaccagagagccaagtgactacatctgtacggcctgttcaaacacttgtccgtaaacgccaggctgattcgttggtttctgagccacaacaagatagtctgactcaaggggaaaccagttctgagattgcacctcctgcatcgaagaaggcaaaaggatctgagtctcatcctgatacttccgaaggtgaaaaccttgcaaaagagccagccatagacgaattgatggatgctacaactacaactgatggtgacaatgaagaaacagaagccgagaatgcagaggagaaaacagaggaatatgtggaagcacaacaagacaatgaagctgatgaaccagtggaagaaagtccaactgagacagaaaccattcctaccgaagaagagtctagggatcagaccgaagaagaaaaccaagagcctcttacagatatggaatccgataaggaagaaggagagctcgatctagatacacttgaagatctggaagagggtacagatgtagcaagcatgatgaggagcccagagaaagaagaagtgcaacctgagacgctagctacacccacacagtcaccttctaggatggagacagcaatggaggaagctgaaacaaccattgagacgccggttgaagatgataagaccgacgaaggaggtgatgcagctgaagaagccgctgatatacctaacaatgctaatgatcaacaagaagcaccagaaactgacatcaagccagagacctcagcagctacaacctcccctgtttctaccgctccaacaacttcctctactctagcttctgctattacttcaagcggagctccagaaacagaagatccaaaaagagcaccgtcaccaggtggtggaagttcaactattgtgacactagctgatagagcacagatgaaaagacgagaaagaatagccaatatagtagtaagtcgagctcctaatccagccaccagaggagctcgtggtcgaactgtaaaccttcgaggaggaggccgattgttgcctcgtggtggtcgagccccacgtggtggacgtggacaatccccgagcccaccatgatttttagtgggtatggttgaacaattagacttat

SEQ ID NO: 10 - protein, 2115 aa, Arabidopsis thaliana
MPLFMPDEELARLSSDAASVVAERADEYIRKIYAELDSVRAKADAASITAEQTCSLLEQKYLSLSQDFSSLESQNAKLQSDFDDRLAELAQSQAQKHQLHLQSIEKDGEVERMSTEMSELHKSKRQLMELLEQKDAEISEKNSTIKSYLDKIVKLTDTSSEKEARLAEATAELARSQAMCSRLSQEKELTERHAKWLDEELTAKVDSYAELRRRHSDLESEMSAKLVDVEKNYIECSSSLNWHKERLRELETKIGSLQEDLSSCKDAATTTEEQYTAELFTANKLVDLYKESSEEWSRKAGELEGVIKALEARLSQVESSYKERLDKEVSTKQLLEKENGDLKQKLEKCEAEIEKTRKTDELNLIPFSNFTRRVDNSGTSNMIEESQAVISKVPAGVSGTALAASLLRDGWSLAKIYEKYQEAVDAMRHEQLGRKEAEMILQRVLSELEEKAGFIQEERGEYERVVEAYCLVNQKLQDSVSEQSNMEKFIMELKADLRRRERENTLLQKDISDLQKQVTILLKECRDVQLRCGAARDDDEDDYPLLSDVEMEMESEADKIISEHLLKFKDINGLVEQNVKLRNLVRSLSEQIESRETELKETFEVDLKNKTDEASAKVATVLKRAEEQGQMIESLHTSVAMYKRLYEEEQKLHSSDSRSSDLSPAVVPGRKNFLHLLEDSEEATKRAQEKAFERIRILEEDFAKARSEVIAIRSERDKLAMEANFAREKLEGIMKESERKREEMNSVLARNIEFSQLIIDHQRKLRESSESLHAAEEISRKLSMEVSVLKQEKELLSNAEKRASDEVSALSQRVYRLQATLDTVQSTEEVREETRAAERRKQEEHIKQLQREWAEAKKELQEERSNARDFTSDRNQTLNNAVMQVEEMGKELANALKAVSVAESRASVAEARLSDLEKKIRSSDPKTLDMDSGGIVSLSDKEAALVIILDVVHKIQAGFRIGSAMSIELRTAKEEIEKLRGEVESSKSHMLQYKSIAQVNETALKQMESAHENFRLEAEKRQRSLEAELVSLRERVSELENDCIQKSEQLATAAAGKEDALLSASAEIASLREENLVKKSQIEAMNIQMSTLKNDLETEHEKWRVAQRNYERQVILLSETIQELTKTSQALAALQEEASELRKLADARGIENSELNAKWSEEKLMLEQQKNLAEKKYHELNEQNKLLHSRLEAKHLNSAEKNSRSGTISSGSTDSDHLEDSGLQRVVHYLRRTKEIAETEISLMRQEKLRLQSQLESALKMAESARGSLTAERASTRASLLTDDGIKSLQLQVSEMNLLRESNMQLREENKHNFEKCQEMREVAQKARMESENFENLLKTKQTELDLCMKEMEKLRMETDLHKKRVDELRETYRNIDIADYNRLKDEVRQLEEKLKAKDAHAEDCKKVLLEKQNKISLLEKELTNCKKDLSEREKRLDDAQQAQATMQSEFNKQKQELEKNKKIHYTLNMTKRKYEKEKDELSKQNQSLAKQLEEAKEEAGKRTTTDAVVEQSVKEREEKEKRIQILDKYVHQLKDEVRKKTEDLKKKDEELTKERSERKSVEKEVGDSLTKIKKEKTKVDEELAKLERYQTALTHLSEELEKLKHADGNLPEGTSAVQVLSGSILNDQAAAYVSAVEYFERVARSIASNSQVSTKPTDMVTEPSSGIPAAEPSTMTRVPSSTPLIKSPVATTQQLPKVASDNKEKRLISQKPSTEFRRPSGRRIVRPQLVKPEESPKVDVDMPEAEGTGDEGKQPAAHEPESQVTTSVRPVQTLVRKRQADSLVSEPQQDSLTQGETSSEIAPPASKKAKGSESHPDTSEGENLAKEPAIDELMDATTTTDGDNEETEAENAEEKTEEYVEAQQDNEADEPVEESPTETETIPTEEESRDQTEEENQEPLTDMESDKEEGELDLDTLEDLEEGTDVASMMRSPEKEEVQPETLATPTQSPSRMETAMEEAETTIETPVEDDKTDEGGDAAEEAADIPNNANDQQEAPETDIKPETSAATTSPVSTAPTTSSTLASAITSSGAPETEDPKRAPSPGGGSSTIVTLADRAQMKRRERIANIVVSRAPNPATRGARGRTVNLRGGGRLLPRGGRAPRGGRGQSPSPP

SEQ ID NO: 11 - DNA, 7966 bp, Oryza sativa
tgtacaattgtagctaacaaaacagaatagtaagtgtaagtactctctccatctcattttaaatatatttgtgaaatttttgttaaacgtttatctgtctgtctgatttatttttttatgattaatatttttattgttattatatgataaaaacataaataatactttatgtatgacttttttattttttcataaaattttcaaataagatggacggtcaaatgctggatacatatacccataaatacactttaaatgagacggaggaagtactcttcttgcggtgggcataagtaacaaatgcgaaaatatataagagagtcaagtcaggacatctggttgtgatagtgatacgacgatgaatgcagcagtcaaggtcctaggtgcgaggacaacaccaagtttttctcctttcgtttgatagcatcagggcatcctcaatccacttatatgcatatcttcaattcatatgtgcttagttttccttatccacctatccacttagaatttttctgatttagtgaactaaagatggcacaaagccattgtatatgtcctcataaattcgatcacatattctagttacaatagaataggagtagaagcaaatggtatttataactgagacttgaagtttaatccagtggattctttttaaagtcctactcaaagaaagttaattgttggtgcttggtgttgggtacattttggtggccattgtaggagtaggtctaataattgccagtagaggtaagattatacagggcggggagggtggcagtggttgtcggagttcccctgttagcaagagaccagttcctgtttggtgtaaaatttatactttggcaaaactaaaaatatcggtaaaaaaatgtattactgtagagttttagaggataactatctttaatgacaagttaaaaatgaataactattttctcggtggttttctaccgttagtgctactataatcaccggtagaagaaatctctcagttgttgatttataaattctaccaccaatagataaaaaacattatactaatagttagggtggcagtataaatagataggatccagtaaaaaaaagtctagatatctattatcaatagagaccatagtaaaacacctacttccttcatcccaaaatgttgctagacagatgatgtccagattcattgttctaggatggagcaacattttgagatggaggaagtataatgtattaccccgcaaccacttgttatacgaatgatttgtagtatatatctagttgagttaacttgacacactaaaacttgagccatgcgcatatgcaatgtttatacatattatagcgtcgcaggattttgattatgttttaatgtgactttcttttcatgtttcttatgagattggattgtttgcactttcattcttcgtacacgtttttcgaactactaaatgatgcgtgttttttataaaaaaaatataggacagttgctttggaaaaaaatgtattaatctatttttaaactttaaatagttaatacccattttctttaatggcttatctcgtattctgtacttcacaatcttctcattttccttctctcaaatactccatccgtccaaaaaaaaaacccacttctgggtttgaatatggacataagtggtttttttttgggagagttacatgttgacctaggacgacgagattgtgcatgcatggggagacgtttgacttttgagcatagctcggcaaaggccggccagattgctagggagaaacagggccaggggagacatgacatatgttgtacactatacaacatcttcagaattatgacaaagcacacacaagtcaccataaaaaacacagacaaactgaagtgaacaaggccaaatcgacccctgttgctgtaatttttgtcatgaaaaagaagggctttaggaaatgacacagatatgagtcatcgaagcaggggatccccaagaacagattgcaaaggcaaggtgtgtgcgcgcgcgcgcataagcttcatcagattcagagagagcttaattatcaccgatgtcccatgcatcgatctgcacctggctgtgcatgtactaccccaatgcatttctctctctacctgcgtgtttgactgcaccttgagcagcagcagcagcctagatgctagctactctgcattggaccatcctcctagtcctaggctgtaggctcatagccctccttgataaaagctactactggcacagtatatgcatgcagccaattcacttcactgcagtaaaaaaaaaaagaaaacagagagaaacagagatcaaacaatgcaagaaagaaatacccctacttctactttaaaacaaggccaaagcaaggaaacaaaaggcagcctctattttttttccctcccccccctgctcatcacccctttccatcactccctccctttgcaaagatccttcctgcctttgcttctactgctatatagcctcccccctcaccttccattccagagaaaaatagagggagggagagggagagaagcagagtgttgagcacaagctagtgaaagggttagatagaaacttggtagaatagacagataggcagagagagagagagagcttagcaagctaaggcttagctgctgcaaggctccatccatgcttcttgttgtgagatgagattgagataagatgagcagggggtggtggtgcctggtgtgaggctataggtaagatggtgggaggagagcttgtgctggctgctctggtgatcctgcttgctttgctgctgaccctggtgctgagccacttcctgcctttgctcctgaatcccaaggctcccaagggaagctttgggtggcctctccttggtgagacgctgaggttcctcagtcctcatgctagcaacaccctgggcagcttcctggaggatcactgctccaggtaaattaaaatcatatgcagtaaacatttctatcagtatcaccaccacaaccacacaggagcaacaagtgtcatcttaccatgcaattaagtactgtaccattatttcatgtgacagcacaaggtaatgctgctgtcctgtcccagcagctttatcacgcccttttttttcctccctgatgaggggggtgctgtaacatgaattggacagtgtttagcatcttgttaaagagttgtgcaaaccttttcttccgatgaacaagcgagagaaaaggaatgtaaaggttgcacaacacttaactagctagcatgcatggtggtagtaacactgatgatggtgtgatgatgatgatgcaggtatgggagggtgtttaagtcccatctgttctgcacccccaccatagtgtcctgtgaccaggagctgaaccacttcatccttcagaatgaggagaggctgtttcagtgcagctaccccaggccaattcatggcattctgggcaagtcctccatgttagtggtcctaggggaggaccacaagaggctcaggaaccttgctctagcactggtcacctccacaaagctcaagcccagctaccttggcgacattgagaagattgcactgcatatagttgggtcatggcatggcaagagcaaggacaaggggatggtcaatgtcatcgccttctgcgaggaggcaagaaaggttagcaagtgtactaacttgaaaccagagccatatcaccacaaggacatgatcccttgaaacaagggagggaaaactttgcacatgttagctacataccatcatcatcatgttgttacttgctgctgcatgaatctttgtcccaaggtcactttgacttaccatggtcttttttaccttttctttttttttctctctctggtgtgctctctttccttgagaaccacagtttgcattcagtgtaatagtgaagcaggtgctggggctatcaccagaggagccggtcactgccatgatacttgaagatttcctcgccttcatgaagggtctcatctctttccctctctacatcccagggacgccctatgccaaagctgtgcaggcatgcaactcaacatctcatttacacaagtcgttaaactgtcaataaaattttcaggccattttatttttgtatacttaccataataacttcatccttttgtccgcgaatcctcacaggccagagcgaggatatcaagcactgtgaagggtattattgaggagaggaggaatgctggctccagcaacaagggtgatttccttgatgtgctgctttcaagcaatgagctctctgatgaggagaaagtgagctttgtgctggattccttactgggaggatatgagaccacctcactcttgatctccatggttgtgtatttccttgggcagtcagctcaagatctggaactagtgaaggtatacagacttctcatgctgaaaaagacagagcagtactggtaaataagtacttaattaagtggccatcaataaaatatatattaacatgtttgcatgcagagggagcatgaaggcataagatcgaagaaagagaaggacgagttcttgagctctgaagactataagaagatggaatatacccaacatgtaagatgatcgttcaatacatgctttaggattagttagtaagccaggggtacctttttttcctattatcagcaactacacaaatatgtgaccctccgaatatgaggtttactcatattcagaacgattctcctatgcctacccatatatgcaatttttgaattaagcaaaaaaaagaaaaagaaacagagagagaaagaatctcattacaatagagtgaaaagggcggaagggacatgttcttcaataatggaaactgtatgatgatgcatatgctatgcccttacaggttatcaatgaggcactgagatgtggcaacattgtcaagtttgtccacaggaaggctctcaaagatgtcagatacaaaggtaattaaccctacttgaggctttccttgaagattccattgtgctcatcacatgataatggatcaggcaaagtggatggttgcacctttattactgatttttaagcattgttattcctaaaatacctcagcttttcatagaagatgctcaaaagcaagtggctcttttttctttgctctgttgcagagtatctgattccttctggttggaaggtcctacctgttttcagtgctgttcatttgaaccccttacttcatggaaatgcccaacaatttcagccctgcagatgggaggtacgtttgtttccataatctgtgaatgctccgcaatacttactaaatgtttattgttaatgacctaatgaaaaatgttttggaccagctaggccacgaagcttagctttcacgtagtatacttttctataatacaaatttataaaatgaaaagttcagagcacctatcaagagagcttatctggagccttgaaagaatcttctttaaagggtgttctctaactaattgctacctttaattagtgagcgcccaactatgacataattactcgcaactattctggtgtcttcagatgccaaacaagctccctgtggctgcaatgccttttgtgcatggtcctaaccatgattcctctcattcaaagccagcattcttggctttgcttccttttcttagtttctgtgatgaagctaatggtctgattcatgtgtgttcctaatctgattgatgcaacagggtgcaagccaagggacaagcaagaagtttacgccgttcggcggtggcccccggctctgccctggatcagagcttgcaaaagtagaggctgctttcttcctccatcaccttgtgctcaattataggtaaaacaaaagggtatatttgtcctacccgagtagaagatgcatggatcaaagttgactggcttaaacagcaatgaacaaaatacgttcagaagtaatatttaagaagctggtgcagagtagttggtgtttaaataggccatagaaaactgttgaggcaaacatgaacaggaaaacatactgatgcagttaccactctcatactgataatacacactacactagaccactagtaagtaatggcaagaaggccatgacagcaactaggcaaattatttatgcttttgtctgtaaggaccgcaagtctgaactcagctatcttgtgcattttcataagtggcactgtagagcatagaatcagacgacaacacacagaacaaacatgacagcatggagttttcgataggtaggctatgcaagttgagttgagggctgccatacaagataaaatatactaccacgatatgatcaaactcttttttttaaaaaaaaaactaggttcattagcaacaatctatacgtgacaactgacaagaacaggcagatttatgtaaattatgcggttgtttcagagtagagtctacatgtacttactgaatatccatgccagagaaaggctgatcatcgttcttcgtttctttcgtttcttgaaaacctgtgcagatggagaatcgatggcgatgacattccgatggcatacccgtacgtggagttccagagaggtctgcccatagaaatcgagccactttgctctgaatcctgacaggtttgcagttgcagccacggtgagcgagttcatcaaatcatccccgcaagcgagggggagatgcgggcgagaacgacggactgagaggattagtcagtgaaacaaaaaaaaggagagaaaatatttcaagaactgaagaatgcactgagcattagctagtagtacctatcaatgagccaagctgagattgtaatttgctgtacatggtgtagatatattttgtccatgccgattgcttgcggtggtggtggtgcggtgcttcaccctgtaacatcctccactgtttcaactttcatctgctattctatagaagaaaaaaaaaagaagaaaattgggctattgggctattgaaaagattttggatgaagccaaagatcttcaaaaacaaatcattgaaactttgaaagagtactcctatcctttaataatatgaacatgaacatgaacatgtatggactgtactctgcactacttctcagggaatttcggagcagacaaattcgatcgtggataatccctatcaatcggagatggctggtcccgtttggattggaggaatttctgaaggaatcctttcctgcaggggaaatcttagtttcagtgtttctggactgaaggaaaaaaccggacgaacagcagcattattccataagagtgggagttcccccccccccccccctcacatcgctagacgatttcacgggataacagtccccgaatccaccacgcgtaacctcgcccaggatcgaggccgaattccagccgaagccgcgccgcgccgtcgtccccgtatccaatccaccgcggcgtcgactctcccgccgttgcgcccggcccaacgccggcggcggtcccgcctctagcggcgcccgcaggatcatctgcacacccccgcgcgacaccgccgcccgccatgcccgccgctcgagctcaacgtgagaaggggaaggggagagagatcatagtatgagaggtttactggagaggataagttaaagagaaaaaaggtataaaaaagaaagaaagagaaagatcataatatgatttttctatgttttttttaccaaaattttcgatgtttattttttaccagaattttctatgtttattttttaccagaattttctatgtttattttttaccaaaattttctatgtttggtggagtaatcctcagtttttgcagtcgtgttgctgtgttttcttttttgcgcctatattcctgtgtaatttgtatagggcataaagtttgtcggaacttgggattatgtggaacatagcatcgcattgttcaggaatgaggactgcaattttgatcttcggggatttgatcttgaaaaacatacgcacatacaaaattgtatcacattgttcaggactcaggattgc

SEQ ID NO: 12 - protein, 480 aa, Oryza sativa
MVGGELVLAALVILLALLLTLVLSHFLPLLLNPKAPKGSFGWPLLGETLRFLSPHASNTLGSFLEDHCSRYGRVFKSHLFCTPTIVSCDQELNHFILQNEERLFQCSYPRPIHGILGKSSMLVVLGEDHKRLRNLALALVTSTKLKPSYLGDIEKIALHIVGSWHGKSKDKGMVNVIAFCEEARKFAFSVIVKQVLGLSPEEPVTAMILEDFLAFMKGLISFPLYIPGTPYAKAVQARARISSTVKGIIEERRNAGSSNKGDFLDVLLSSNELSDEEKVSFVLDSLLGGYETTSLLISMVVYFLGQSAQDLELVKREHEGIRSKKEKDEFLSSEDYKKMEYTQHVINEALRCGNIVKFVHRKALKDVRYKEYLIPSGWKVLPVFSAVHLNPLLHGNAQQFQPCRWEGASQGTSKKFTPFGGGPRLCPGSELAKVEAAFFLHHLVLNYRWRIDGDDIPMAYPYVEFQRGLPIEIEPLCSES

SEQ ID NO: 13 - DNA, 4963 bp, Oryza sativa
atgtagtatatttttattctactggctcttgtactggatgttgctgctgcaagtgatcgatgcatgcatgagagtgatgagctgcttctgcttgttgccttcctcactttgggcatttctctctcgccttcctgtccattgctggccttatgtgaggttttgccaatacctctaatcatctcctctctcactttctctctctcttgatgctactactgccttgcagaggcagcaacaggagagagtagcagattcctttgttgttctgcccacaagagagaactcacaactcacaagtagtagcagtaacaacatcagcagcaggtactactagacccacacacatgcaagcacagatatgagtatatgatctttctcccatgccacaagtgaaaagatttctccctctccattatcctttgtttccttttgccttttgtattgttctgaatgcatgctgctagctactccagctactggttgctctctctacacatgtgtgtatacaactacacatactatgcttatttgtacaaaattttgtgcagggttggaagcaagggatctctgcatgctgtggttgcatgacacagatgcacatgtcccttttggtgggtaatgatggggtgcaggtggaggtgatgatagattgcctcatctggggactgagacattccatccaagggtgcccaatgccatgccctcacattcactcacagctagtagagctatccccctcccctcccctctttgcaatattccatttgtttgctaatgtgttgtatcaagatgcccttgatgtgagtgttcactgccctctctgtccctcattttttgcatctctcattctcatgcattgcataccatgtacaactactgcttcagctagaattgcatgtgatgtatatatatgatagtatatcctttgcatctcgggaaaatatgtagtgcaaatcacatatatagtggaaacttgaaaactaccgttgaatcgagaaatggacgtccgagattcgtccacgtcatcatgagttaaaatttaactcgcagattcactcatgagttaaaattttactcggagttaaattttaactcatgatgacgtaaacgaatctcggacgtccatttctcgatccaatggtagttttcaagttttcactacatatgtggtttgtactgtatattttcccttgcatctccatgtatctcaaaagttacatgagtggcacttgctactgtgcatgtagtatgtgtagcagctaggttataaatttctttatgtgtaacatgtgtgtgatgcatagtatatgcaatgtgaaacactgacacagctagaccaggtgtggggggtgtgcttgttcttgttgcaaggaagttatctggaggccatcatcaatgaagatcccaccaagggacaaaacatgagatggttggagacttgggtctgtctagtctctattcaaccatttaaagcattgcgtgtgtaggctacactcggagagagaacacagagcagccgtccaaaccgtctgaaatgataacttactctaagctagtaggagtgctagtagtaccctctatatgtgcaattttattcgttaaaaaggtttccatgcatgcttttttagtttatcaatagcctaaaccttttgaattattaagagttaattagtcccaagtgtgtatgattactcccccaaattctctttgttttcttcgaaaaatttgcagttatttaagtgaggtcctctctctctctctctctctctctctctttgataaactgaggttctcaagtttcatgttttaccaattaatcaatcccaagtaggttttatttttgttgatttaagtcctcggacctcaagccctgaacattcaataatttatcaaattcaaggacctgcagttagataatttttagttaatagaaaaaaatatcgcatttgttgcaacgggtgaagactattttaatcttattattgttatacggtttagctagggtaaaatttactctaaaaattcgtttgaactttttttaaaaatgtcatgagctacaattaggagtttgactttcgtcacaagttagcatgcaagtttttttaaatatatttcttatacgactccttttgtattttcaaaagtgaacaaacataaaagctaactcaaacacaaatctatatttgcaaaagcgaacgaaattaaaaaccagctcaaacaagaatgacatacaaagtactgacaaaaacatatttaatttttataatagtagagatatgagtaaaagggaccaaaatcaacaaagcaaatagtggagagccggaatcaacactgtctgacttggtgaagatctcaattacacaaaaatgaatgctttaaaaggatcatttaattaaagaaataccaaatatataataatagctagtaccatcatattatatatactccctttgtccctgaaagagtattatccagattcattcatagctaaaaatacactcttttagagatggccggagtatcattatatgtctatagcatatacttctacttaacatatataaatacatactccctccgccctaaaataagtgcagttttgcactattcacgttcaacgtttgaccgtccgtcttatttgaaaattttttatgattagtatttttattgctattagatgataaaacatgaatagtactttatgtgtgactaaatgtttttaattttttataaatttttcaaataagacggacggtcaaacgttgaacgtgaatagtgcaaaactgcacttattttgggacggagttagtacatatatatacacattacacattgcatacataaacatacaaccacactgccctctagctatacacatgccatgatgccaagagccaatgatcaccacccaaatccttctagcaatagctccctatggcacaaacagtcacagctgcacaaacacacacacacacacacatatcacccattcatctactctagctaatctaaaggcactagcatagtactacaatcaaccagtagtagtagccctcatttgcatgtttttatttcgcccaccaatccttggaatgttttagattcccccctctcactctctcatcaaggaatgagcatcccccattctcccccaacccctcatattttcagtttctcactctacctttcccctcctcccctagctaacccctctctctttctctctctaaagctccaatctttctacctttctctctctaaaagctggagtagcttaatttctttctttctttttctttctcagctgggattgcacagtgaagctagggagaggctatagctatgggggtgatgtagctgggcagtgaggctagtgacaatctctctctcacacacacacacacaaaaacacttgtgtatttttggcagatgatgtcctgtcaaggaagctgcaattgcaagcccagatgttggacgtgcacgctcgccctccctattaaacccgccctcctccgatgctccctctcctcctcccccctcgccgccgccgccgccaccttctccggcagctcaccgtcgttgtagtagctctggtggtggtggtggtgacgacgacggctacggcggcggcgacggcatgctccggtcactccactcctcgtcgtcttctgacacggataacaacagcggtggctgcaagaacaatggcggcggcggtggcgaggccgccgccgccgttgagggtggcggtgatcagcgtgccgttgcggcggcggcgccgtcgacgcgggacttgctgctggcgtgcgcggacctgctgcagaggggggacctgccggcggcgaggcgagcggcggagatcgtcttggcggcggcggcgtcgccgcggggcgacgcggcggaccgcctggcgtaccacttcgcccgcgcgctggcgctccgggtggacgccaaggccggccatggccacgtcgtcgtcggcggcggcgcggcgcggccggcgtcgtccggggcgtacctggcgttcaaccagatcgcgccgttcctgcgtttcgcgcacctcacggcgaaccaggccatcctcgaggccgtcgacggcgcgcgccgcgtccacatcctcgacctcgacgccgtccacggcgtgcagtggccgccgctgctgcaggccatcgccgagcgcgcggacccggcgctcggcccgcccgaggtccgcgtcaccggcgccggcgccgaccgcgacaccctcctccgcaccggcaaccgcctccgcgccttcgcccgctccatccacctccccttccacttcaccccgctcctcctctcctgcgccaccacggcgccccaccacgtcgccggcacgagcaccggcgccgccgccgccgcctcgaccgccgccgccgccactggcctcgagtttcacccggacgagacgctcgccgtgaactgcgtcatgttcttgcacaacctggccggccacgacgagctcgccgcgttcttgaagtgggtgaaggccatgtcgcccgccgtggtgaccatcgccgagagggaagcaggcggcggcggcggcggcggcgaccacatcgacgacctgccgcggcgggtcggggtggccatggatcactactcggcggtgttcgaggcgctggaggcgacggtgccgccggggagccgggagcgcctcgccgtggagcaggaggtgctgggccgggagatcgaggccgcggtggggccctccggcggccggtggtggcgcggcatcgagcggtggggcggcgccgcccgcgccgcggggttcgcggcgcggccgctcagcgcgttcgccgtgtcgcaggcgcggctgctgctccggctgcactacccgtcggagggctacctcgtgcaggaggcgcgcggcgcctgcttcctcgggtggcagacgcgcccgctgctctccgtctcagcgtggcagccgtcgtcgtcgtag

SEQ ID NO: 14 - protein, 666 aa, Oryza sativa
MHESDELLLLVAFLTLGISLSPSCPLLALCEGWKQGISACCGCMTQMHMSLLVGNDGVQVEVMIDCLIWGLRHSIQGCPMPCPHIHSQLVELSPSPPLFAIFHLFANVLYQDALDYMQCETLTQLDQVWGVCLFLLQGSYLEAIINEDPTKGQNMRWLETWEAAIASPDVGRARSPSLLNPPSSDAPSPPPPSPPPPPPSPAAHRRCSSSGGGGGDDDGYGGGDGMLRSLHSSSSSDTDNNSGGCKNNGGGGGEAAAAVEGGGDQRAVAAAAPSTRDLLLACADLLQRGDLPAARRAAEIVLAAAASPRGDAADRLAYHFARALALRVDAKAGHGHVVVGGGAARPASSGAYLAFNQIAPFLRFAHLTANQAILEAVDGARRVHILDLDAVHGVQWPPLLQAIAERADPALGPPEVRVTGAGADRDTLLRTGNRLRAFARSIHLPFHFTPLLLSCATTAPHHVAGTSTGAAAAASTAAAATGLEFHPDETLAVNCVMFLHNLAGHDELAAFLKWVKAMSPAVVTIAEREAGGGGGGGDHIDDLPRRVGVAMDHYSAVFEALEATVPPGSRERLAVEQEVLGREIEAAVGPSGGRWWRGIERWGGAARAAGFAARPLSAFAVSQARLLLRLHYPSEGYLVQEARGACFLGWQTRPLLSVSAWQPSSS

SEQ ID NO: 15 - DNA, 2588 bp, Oryza sativa
agtttcagtttcagagagaggagtcagtggctgtatgctgccatggctctcaaggtggctagatagacagacatgttgcccatcaacttaagaagcaactagctgctgctgctgctaagggagagctataggcttagctgtggtaggctatagatattactattaggtagctactagcctataggcagacatggggagacctccatgctgcgacaatggcgtcggcgtcaagaaagggccatggacgccagaggaggacatcatcctcgtctcctacatccagcagcatggccccgggaactggcgctccgtgcccgagaacaccggttagccccccccccctccccctggctctcgcgttttcgatccattcgtcgtcgaatgatcgatattgcatgtgtttgatttttgcatggttgatatcagaagctgttttagttatgcttctgttgttgtttaggagttgatgataagtttgtttctgttgtgttttttgtatgtgtttaggattgatgaggtgcagcaagagctgcaggctgcggtggacgaactacttgagaccggggatcaagcgtggcaacttcacccctcatgaggaggggatcatcatccacctccaggcattgcttggcaacaagtaatcacgtacataactcaatttaaataaattgttgtatcatatacatgagcatcaaaatctaatgggatgtttttagtttattttctatccttgaagagatatatatacatccgtaccactccgagataaaaaaaactgtaaatcaattgaactgattagaattgacattgttagaattttcctggttcttgggatgaataaaatgtttacttttatatgtgaatctagatgtagattatgtccagattcatttaaaaaatagacttattttataacggagggagcatataacctcatagttttacacgtaaggtacatacctcctaactaatactcatacctcttaaagattgaagaaaacgccaacaaatatataggtgaactcccaatcctactctcatttgttatgatattggttttggtacatcacttcacagatcttatatacctctgaactctagtccaagaatgaaagaaaacctctatgcactcctatatattgtttatagtttaagcttagttttatgataactcaagcaaaccctgactttctgatgatcatctgaactttttcaaaatcatattgtctttaccttaatcatgctttaccttttgcatatattacatgacaggttataacatacgccctccgtcccaaaaaactcaacttctagagattgaattttgtctaaaaaaaacaacttctatcatcctacctactctcagtacgtaaaacgagaagttttatcccttcaataccctttacctatctatctctcttactactttttttcaatgattatgggtattttagtcaatcttcatctccactatttttgtcttgggatgttaggattgacatttttatgggacggagagagtagtgcctaaatatttatctattgtgcatgcaggtgggcagcaatagcctcctacctcccccaaagaacagacaacgacatcaagaactactggaacacacacctcaagaagaaggtgaagaggctgcaacaacaacaacaatcacaccctgatcatcatcaccaccattccttccaaaccaccccttcttcctccaatgcagcagcagtagcaacaaccagcccaaactactacaaccctaacaacagcaacagcaacagcagcaattacctccataacaacaaccacaatcttgaatccatgcaatccatggccactgcacctagcaatgaggccaccaccatccccaagctcttccagttccagacatggatgaagccatcaccagcaacaacatcatcagcagcaacagctgctgcaggtagctgctacaagcaggccatggccatgcaggagctccaagaggagcaagagggctctgctgctgctgctgcaatggcttcttccattgatggcgtctccaaggaccaggattatcacatgtgtgctgtgatcagtggtgatgacaagtcgtcgtcgtcggagatgatgacggctgcggcaatggccggccatggcgaggcggccacgacgaccttctcgctgctcgagaactggctgctcgacgacatgccggggcaggcggccatgagcgccgccatggatgggttcttggagatctctgctggatactgctgtgcagaccctatcatgttctgaactttctgaacttctgatgatcatctcagccttaatttcccatatgagtctctctttgctataggtttcttaatttcactgagttaatttgcacttgtactagctgtttgatgctctctctctctcgatgatcttgtgtttccggtaataaaccgttggtttaatttcctcaagaaaaagcaatccacctggaaataatctggttggtttggagaaatattgtcagttctcaaggatgtaataaaaggattaaagctgccataattcgttgcctgatatgcaatgttcttgttgtttttggagatgg

SEQ ID NO: 16 - protein, 330 aa, Oryza sativa
MGRPPCCDNGVGVKKGPWTPEEDIILVSYIQQHGPGNWRSVPENTGLMRCSKSCRLRWTNYLRPGIKRGNFTPHEEGIIIHLQALLGNKWAAIASYLPQRTDNDIKNYWNTHLKKKVKRLQQQQQSHPDHHHHHSFQTTPSSSNAAAVATTSPNYYNPNNSNSNSSNYLHNNNHNLESMQSMATAPSNEATTIPKLFQFQTWMKPSPATTSSAATAAAGSCYKQAMAMQELQEEQEGSAAAAAMASSIDGVSKDQDYHMCAVISGDDKSSSSEMMTAAAMAGHGEAATTTFSLLENWLLDDMPGQAAMSAAMDGFLEISAGYCCADPIMF

SEQ ID NO: 17 - protein, 2038 aa, Oryza sativa
MPLFMSEEELRLLGGDVAAVAERADAAIRELRQQVDTVRAEADAAAIAAEQTCALLEQRYDTLSAEADRFRAELAELAAASERRAADLASSQSEIHQLRIQAIAKDGEIERLKVEISEVHKSKSQSLELIEQRDAEIREKDGIIQNYHDKIVNLADSSASKGARIQEVEAKFTHLQATCNRITQEKDLLEKHNLWLDEELKEKVKNLAELRKSNMDEEARMSAKVAELERETSESSSSLRRSKERVSELEQRVSYMEKELCSTKDAAAANEQRLAAELSTVMKLAELHKESSEEWSKKAGELEGVIKALETHLTQVEDEYKEKLEKETSAKRDLEMEATYLKQKLEKCESDLENTRKSSELSFTPLVAADPCDLAGSPMKEMAFSDPANQNDLMIVPKVPTGVSGTALAASLLRDGWSLAKIYEKYQEATDALRHERFGRRHAEAVLERVLHEIEEKAELILDERAEHRRMVEAYALMDQKLQQALLEHDNFENTIRNLKSELKRRERDHSIAQKEIDDLQKQIKLSIYLTFAPTQACILGVCTSKNYYDINGNHCGAVLKIAVLLKECQDIQLRCGSSLPNVGDGALSTSTSTGVPEVENNIHEHMTFNDINGLVQQNVQLRNQVHLLSADLDKRDMELRESFQIELKKITDDAASRVEKVMKKSEEQAIMIESLHRSVAMYRKLCQEQQKSRSNVEHIPKNLEDDGRKDLMVLFEGSQEVSRKAYEQVSERAKSLDEELTKLRTELLSLRSERDKAVLEAEFARERLNGFTAELEHQRKEANSISLRNAELMHLVVDYEKRLRENSESMKAVEENSRKLLMEMSILKNEKEILAKSEKKALEEVHDLTTRVHRLQATIDTIHATEEVQENARSIERRNQEEYIKRLERDWAEVKKELQEQRDHVRVLTLDKKNAFDGCLKQVEDMRKELQNSWKAATDAESRAAVAEAKCSDMETKLKSRKENDELFQLKEELEKYKEEAQANKSYMLQYKEIANSNESALKQMESALQDFKTESETIKKSLEDEITKLRTKISELEKCYIMKCEEAASAIEAKEKDTTSLMKEISVLRNEVSEKVIQIEKLETELASSKRALDEQYKRWRSAQDNYERQVILQSETIQELTSASKELSSLQQEIIVLRQTVETQKAENDGLRTLGEQEKIELVKGKDEALQKYNELNDQNKILHNQLEALHIRLAEKERNIAGLSSQRIDSHGEDDLHSVIGYLRRSKEILESALKSTKEAQDLLRSQTDSARTSMLKDEEFKSLQFQVRELNLLRESNIQLREENKHNFEECQKFHDEAQKAKMEAERLHNLLLEKQVDAEICKKEIEMQKTEIANLNQKISELVENSRGVDLSTYETMKDELQNIKATLRENSAELERTKKLLSEKDSVIRNLEEKLAGCLSELDAREKKLNDVEASLKSEIDRHRKININIKRKLDASAKEKEELTKEKQSLSKQLEDLKSSQKTTTENSNEQAIKEKDFRIQTLEKVLEKERDDNKKEKAFRRRNEKVFTTAIQNMNQERKQVEESIEKHRQAVKEVIEHYTGISSQIPSGSAIDEQLRSYFLAIKAVEESPSPFQDGAASQTPSVESADVDASAATAGRQVATPPRPAQVKVVEERAVSTLPKPSTEVRRPGGRRPLVRPSLERVEEPQADIDTTVVEGSTEKGGLLMERETPGGVSALQPSSRKRLIPSPQMRDDASQGETTDANPPLKKPKEGSSQGTSELKTEQSPHEDVMAPVPVLPSTELDEQQPGEEMDTDQSSLPVEEVEETREDDLGDKDDMETHMDASMDIQGQDAETGIDNDATTVEDVPVKSEAVMESLEEDLKTEDGKEEGQFTATTDVEDEREEGELPDEPEQPDSTPPVLDVGEQAGDSFRAASPAGPTEKSDVDMPEETGEGDGTMESDQSPVPQSGGADASPSQMADASPSPAREPSPNPVQAGAPPEQQNPTPPNPVQAGASSEQQNPATAAEGVETRSTRTINLTERARQNRQARILRSATQQNARGRGNQSLTYRKDGGRGTRGRGGRGQS

SEQ ID NO: 18 - protein, 1978 aa, Oryza sativa
MPLFMSEEELRLLGGDVAAVAERADAAIRELRQQVDTVRAEADAAAIAAEQTCALLEQRYDTLSAEADRFRAELAELAAASERRAADLASSQSEIHQLRIQAIAKDGEIERLKVEISEVHKSKSQSLELIEQRDAEIREKDGIIQNYHDKIVNLADSSASKGARIQEVEAKFTHLQATCNRITQEKDLLEKHNLWLDEELKEKVKNLAELRKSNMDEEARMSAKVAELERETSESSSSLRRSKERVSELEQRVSYMEKELCSTKDAAAANEQRLAAELSTVMKLAELHKESSEEWSKKAGELEGVIKALETHLTQVEDEYKEKLEKETSAKRDLEMEATYLKQKLEKCESDLENTRKSSELSFTPLVAADPCDLAGSPMKEMAFSDPANQNDLMIVPKVPTGVSGTALAASLLRDGWSLAKIYEKYQEATDALRHERFGRRHAEAVLERVLHEIEEKAELILDERAEHRRMVEAYALMDQGVCTSKNYYDINGNHCGAVLKIAVLLKECQDIQLRCGSSLPNVGDGALSTSTSTGVPEVENNIHEHMTFNDINGLVQQNVQLRNQVHLLSADLDKRDMELRESFQIELKKITDDAASRVEKVMKKSEEQAIMIESLHRSVAMYRKLCQEQQKSRSNVEHIPKNLEDDGRKDLMVLFEGSQEVSRKAYEQVSERAKSLDEELTKLRTELLSLRSERDKAVLEAEFARERLNGFTAELEHQRKEANSISLRNAELMHLVVDYEKRLRENSESMKAVEENSRKLLMEMSILKNEKEILAKSEKKALEEVHDLTTRVHRLQATIDTIHATEEVQENARSIERRNQEEYIKRLERDWAEVKKELQEQRDHVRVLTLDKKNAFDGCLKQVEDMRKELQNSWKAATDAESRAAVAEAKCSDMETKLKSRKENDELFQLKEELEKYKEEAQANKSYMLQYKEIANSNESALKQMESALQDFKTESETIKKSLEDEITKLRTKISELEKCYIMKCEEAASAIEAKEKDTTSLMKEISVLRNEVSEKVIQIEKLETELASSKRALDEQYKRWRSAQDNYERQVILQSETIQELTSASKELSSLQQEIIVLRQTVETQKAENDGLRTLGEQEKIELVKGKDEALQKYNELNDQNKILHNQLEALHIRLAEKERNIAGLSSQRIDSHGEDDLHSVIGYLRRSKEILESALKSTKEAQDLLRSQTDSARTSMLKDEEFKSLQFQVRELNLLRESNIQLREENKHNFEECQKFHDEAQKAKMEAERLHNLLLEKQVDAEICKKEIEMQKTEIANLNQKISELVENSRGVDLSTYETMKDELQNIKATLRENSAELERTKKLLSEKDSVIRNLEEKLAGCLSELDAREKKLNDVEASLKSEIDRHRKININIKRKLDASAKEKEELTKEKQSLSKQLEDLKSSQKTTTENSNEQAIKEKDFRIQTLEKVLEKERDDNKKEKAFRRRNEKVFTTAIQNMNQERKQVEESIEKHRQAVKEVIEHYTGISSQIPSGSAIDEQLRSYFLAIKAVEESPSPFQDGAASQTPSVESADVDASAATAGRQVATPPRPAQVKVVEERAVSTLPKPSTEVRRPGGRRPLVRPSLERVEEPQADIDTTVVEGSTEKGGLLMERETPGGVSALQPSSRKRLIPSPQMRDDASQGETTDANPPLKKPKEGSSQGTSELKTEQSPHEDVMAPVPVLPSTELDEQQPGEEMDTDQSSLPVEEVEETREDDLGDKDDMETHMDASMDIQGQDAETGIDNDATTVEDVPVKSEAVMESLEEDLKTEDGKEEGQFTATTDVEDEREEGELPDEPEQPDSTPPVLDVGEQAGDSFRAASPAGPTEKSDVDMPEETGEGDGTMESDQSPVPQSGGADASPSQMADASPSPAREPSPNPVQAGAPPEQQNPTPPNPVQAGASSEQQNPATAAEGVETRSTRTINLTERARQNRQARILRSATQQNARGRGNQSLTYRKDGGRGTRGRGGRGQS

SEQ ID NO: 19 - protein, 1978 aa, Oryza sativa; identical to SEQ ID NO: 18

SEQ ID NO: 20 - protein, 1978 aa, Oryza sativa; identical to SEQ ID NO: 18

SEQ ID NO: 21 - protein, 1978 aa, Oryza sativa
MPLFMSEEELRLLGGDVAAVAERADAAIRELRQQVDTVRAEADAAAIAAEQTCALLEQRYDTLSAEADRFRAELAELAAASERRAADLASSQSEIHQLRIQAIAKDGEIERLKVEISEVHKSKSQSLELIEQRDAEIREKDGIIQNYHDKIVNLADSSASKGARIQEVEAKFTHLQATCNRITQEKDLLEKHNLWLDEELKEKVKNLAELRKSNMDEEARMSAKVAELERETSESSSSLRRSKERVSELEQRVSYMEKELCSTKDAAAANEQRLAAELSTVMKLAELHKESSEEWSKKAGELEGVIKALETHLTQVEDEYKEKLEKETSAKRDLEMEATYLKQKLEKCESDLENTRKSSELSFTPLVAADPCDLAGSPMKEMAFSDPANQNDLMIVPKVPTGVSGTALAASLLRDGWSLAKIYEKYQEATDALRHERFGRRHAEAVLERVLHEIEEKAELILDERAEHRRMVEAYALMDQGVCTSKNYYDINGNHCGAVLKIAVLLKECQDIQLRCGSILPNVGDGALSTSTSTGVPEVENNIHEHMTFNDINGLVQQNVQLRNQVHLLSADLDKRDMELRESFQIELKKITDDAASRVEKVMKKSEEQAIMIESLHRSVAMYRKLCEEQQKSRSNVEHIPKNLEDDGRKDLMVLFEGSQEVSRKAYEQVSERAKSLDEELTKLRTELLSLRSERDKAVLEAEFARERLNGFTAELEHQRKEANSISLRNAELMHLVVDYEKRLRENSESMKAVEENSRKLLMKMSILKNEKEILAKSEKKALEEVHDLTTRVHRLQATIDTIHATEEVQENARSIERRNQEEYIKRLERDWAEVKKELQEQRDHVRVLTLDKKNAFDGCLKQVEDMRKELQNSWKAATDAESRAAVAEAKCSDLETKLKSRKENDELFQLKEELEKYKEEAQANKSYMLQYKEIANSNESALKQMESALQDFKTESETIKKSLEDEITKLRTKISELEKCYIMKCEEAASAIEAKEKDTTSLMKEISVLRNEVSEKVIQIEKLETELASSKRALDEQYKRWRSAQDNYERQVILQSETIQELTSASKELSSLQQEIIVLRQTVETQKAENDGLRTLGEHEKIELVKGKDEALQKYNELNDQNKILHNQLEALHIRLAEKERNIAGLSSQRIDSHGEDDLHSVIGYLRRSKEILESALKSTKEAQDLLRSQTDSARTSMLKDEEFKSLQFQVRELNLLRESNIQLREENKHNFEECQKFHDEAQKAKMEAERLHNLLLEKQVDAEICKKEIEMQKTEIANLNQKISELVENSRGVDLSTYETMKDELQNIKATLRENSAELERTKKLLSEKDSVIRNLEEKLAGCLSELDAREKKLNDAEASLKSEIDRHRKININIKRKLDASAKEKEELTKEKQSLSKQLEDLKSSQKTTTENSNEQAIKEKDFRIQTLEKVLEKERDDNKKEKAFRRRNEKVFTTAIQNMNQERKQVEESIEKHRQAVKEVIEHYTGISSQIPSGSAIDEQLRSYFLAIKAVEESPSPFQDGAASQTPSVESADVDASAATAGRQVATPPRPAQVKVVEERAVSTLPKPSTEVRRPGGRRPLVRPSLERVEEPQADIDTTVVEGSTEKGGLLMERETPGGVSALQPSSRKRLIPSPQMRDDASQGETTDANPPLKKPKEGSSQGTSELKTEQSPHEDVMAPVPVLPSTELDEQQPGEEMDTDQSSLPVEEVEETREDDLGDKDDMETHMDASLDIQGQDAETGIDNDATTVEDVPVKSEAVMESLEEDLKTEDGKEEGQFTATTDVEDEREEGELPDEPEQPDSTPPVLDVGEQAGDSFRAASPAGPTEKSDVDMPEETGEGDGTMESDQSPVPQSGGADASPSQMADASPSPAREPSPNPVQAGAPPEQQNPTPPNPVQAGASSEQQNPATAAEGVETRSTRTINLTERARQNRQARILRSATQQNARGRGNQSLTYRKDGGRGTRGRGGRGQS

SEQ ID NO: 22 - protein, 1978 aa, Oryza sativa; identical to SEQ ID NO: 21

SEQ ID NO: 23 - protein, 1978 aa, Oryza sativa; identical to SEQ ID NO: 21

SEQ ID NO: 24 - protein, 1978 aa, Oryza sativa
MPLFMSEEELRLLGGDVAAVAERADAAIRELRQQVDTVRAEADAAAIAAEQTCALLEQRYDTLSAEADRFRAELAELAAASERRAADLASSQSEIHQLRIQAIAKDGEIERLKVEISEVHKSKSQSLELIEQRDAEIREKDGIIQNYHDKIVNLADSSASKGARIQEVEAKFTHLQATCNRITQEKDLLEKHNLWLDEELKEKVKNLAELRKSNMDEEARMSAKVAELERETSESSSSLRRSKKRVSELEQRVSYMEKELCSTKDAAAANEQRLAAELSTVMKLAELHKESSEEWSKKAGELEGVIKALETHLTQVEDEYKEKLEKETSAKRDLEMEATYLKQKLEKCESDLENTRKSSELSFTPLVAADPCDLAGSPMKEMAFSDPANQNDLMIVPKVPTGVSGTALAASLLRDGWSLAKIYEKYQEATDALRHERFGRRHAEAVLERVLHEIEEKAELILDERAEHRRMVEAYALMDQGVCTSKNYYDINGNHCGAVLKIAVLLKECQDIQLRCGSILPNVGDGALSTSTSTGVPEVENNIHEHMTFNDINGLVQQNVQLRNQVHLLSADLDKRDMELRESFQIELKKITDDAASRVEKVMKKSEEQAIMIESLHRSVAMYRKLCEEQQKSRSNVEHIPKNLEDDGRKDLMVLFEGSQEVSRKAYEQVSERAKSLDEELTKLRTELLSLRSERDKAVLEAEFARERLNGFTAELEHQRKEANSISLRNAELMHLVVDYEKRLRENSESMKAVEENSRKLLMKMSILKNEKEILAKSEKKALEEVHDLTTRVHRLQATIDTIHATEEVQENARSIERRNQEEYIKRLERDWAEVKKELQEQRDHVRVLTLDKKNAFDGCLKQVEDMRKELQNSWKAATDAESRAAVAEAKCSDLETKLKSRKENDELFQLKEELEKYKEEAQANKSYMLQYKEIANSNESALKQMESALQDFKTESETIKKSLEDEITKLRTKISELEKCYIMKCEEAASAIEAKEKDTTSLMKEISVLRNEVSEKVIQIEKLETELASSKRALDEQYKRWRSAQDNYERQVILQSETIQELTSASKELSSLQQEIIVLRQTVETQKAENDGLRTLGEHEKIELVKGKDEALQKYNELNDQNKILHNQLEALHIRLAEKERNIAGLSSQRIDSHGEDDLHSVIGYLRRSKEILESALKSTKEAQDLLRSQTDSARTSMLKDEEFKSLQFQVRELNLLRESNIQLREENKHNFEECQKFHDEAQKAKMEAERLHNLLLEKQVDAEICKKEIEMQKTEIANLNQKISELVENSRGVDLSTYETMKDELQNIKATLRENSAELERTKKLLSEKDSVIRNLEEKLAGCLSELDAREKKLNDAEASLKSEIDRHRKININIKRKLDASAKEKEELTKEKQSLSKQLEDLKSSQKTTTENSNEQAIKEKDFRIQTLEKVLEKERDDNKKEKAFRRRNEKVFTTAIQNMNQERKQVEESIEKHRQAVKEVIEHYTGISSQIPSGSAIDEQLRSYFLAIKAVEESPSPFQDGAASQTPSVESADVDASAATAGRQVATPPRPAQVKVVEERAVSTLPKPSTEVRRPGGRRPLVRPSLERVEEPQADIDTTVVEGSTEKGGLLMERETPGGVSALQPSSRKRLIPSPQMRDDASQGETTDANPPLKKPKEGSSQGTSELKTEQSPHEDVMAPVPVLPSTELDEQQPGEEMDTDQSSLPVEEVEETREDDLGDKDDMETHMDASLDIQGQDAETGIDNDATTVEDVPVKSEAVMESLEEDLKTEDGKEEGQFTATTDVEDEREEGELPDEPEQPDSTPPVLDVGEQAGDSFRAASPAGPTEKSDVDMPEETGEGDGTMESDQSPVPQSGGADASPSQMADASPSPAREPSPNPVQAGAPPEQQNPTPPNPVQAGASSEQQNPATAAEGVETRSTRTINLTERARQNRQARILRSATQQNARGRGNQSLTYRKDGGRGTRGRGGRGQS

SEQ ID NO: 25 - DNA, 5745 bp, Oryza sativa
gcacatatgagaccatgaaggatgaacttcaaaacataaaagttagtggttttttttattatttttatcttttcaaatcattttgataagtatttttagttattatgttatacttattcttttggtgattgaatttggtctgaacatattttttgttctataaattgtactctgatccaagatataagaacttctggtattcttggggattaaggaaagaggtgaaattgaattggggatggttgcgattagttgagatgaggaaacaagtagagaaattagatgagaaatggttgtgattagttgggatgggggagtaggtgaagttgctatattttgggacattgagagtactgataaaataatactacatttgttcttttgtatgctggtttgactagagatcaactgtttaatgaagcattcggttctgaacctagttcaagcttggaatcagatagctacggtaaagaatagggaaaatgaccattggtgagacaattagagggaggggacagacaatatagtctggaataagaacttttgaagcgaaacatactttctaattattatcggctatcgctggtattggacttgttatgccctttcatgcgcatatgctgctcgttttctaattattgatggcagttgagttagtttcccacttttctcaacttctaatcgctcgttttccacacgcacacttttcaaactgctaaacagtgtgtttttgaaaaaaaaacatatatatcgattttcaactttttttttaaataatacttaattaatcatgctctaatgagtagcccagttttccatgcaggagggataagttctcaacctgtattaacgaacacagccttagtgatatataacactgatactgatgtacatcccttaattagcatggatggctggcttaaatttcattatttggtcaatacgactgaacttaatgagtttgtaaggttgagttttgtgataaacgattatcacatgtatttcttaaatacaacaggcaaccttgagagagaattcggcagagctagagcgcacaaaaaaacttctttctgagaaggattctgtaataagaaatttggaggaaaagcttgctggatgtcagtctgaattggatgctagggaaaagaagctgaatgatgttgaggtctgatataatttccagtaacattctcctggccatttttactttagttgtattagtaatgcctttccttttgcaggctagccttaaatctgaaattgacagacataggaagattaatatcaacataaaggttaggatctttcccttgttcttctattgcaagatcgaaagttcattgctgttttcatgtgcttatatcatcctattaaataatgtagaggaagcttgatgcatcagcaaaagagaaggaggaactgacgaaagaaaaacaaagcctttcaaagcaattggaagatctcaaatcaagtacttaattaatcttattactttcacacaaccacctgaattatatattttgtatgatcactcatgttttaaatttgatatactttagcaggtcagaaaactacaacagaaaattcaaatgaacaggccatcaaagaaaaggacttcaggatacaggtcaggaggttgtgatttttatgaacatgaactccttcaggtttcttacataaacatatattaacagacattggaaaaagtcttggagaaagagagagatgataataagaaagaaaaagcattccgcagaaggaatgagaaagtatttactaccgccattcaaaatatgaatcaggtatttcttcctcaactagcctgagtacagtcttgtcttaaaaatttttttgtttatcgtcagttgggtttagattgagcaccaaatttatcatggaactactgatttaatacagattgtcacaaagctacacattaagtagcaaatttgtcacaaagctactggtttattgccaatttaatcccaaaactacaacgtctatatcttcaacataactgtagtgctagggattgaaaatctaaaatctgtagtttttttataacttgagcaataaatctgtagttttgtgatacttctccctaaatctgtacctgatagctttgggggagtggattctaatcccttgaggggatgtcccgtcgtgtacctttttctttcaaattcgatacaaatagttgtaaaaatttatgaaaaaaattcgacctactatttatatctctcgacgtgtgcgttgcgtttggacctaagattttatggagttgtatacttatgttgtatgagtgttgtcgatcttttccagaatttttcataaccatttggatggtttttaagcaaacaaggggacatccctcgagggatcaaaatagtttccctagttttggcactaaatgtatagttttgtgatttgtcttaaatccgtagtttgtgaaattttctccttttttttaaccgatgcagtagattttctaataagaaaagccaaggaagtagacattaagataatgaaagattgatatgttgacatgttcacagatgaacttagaaaaatgaaaaacttaatgtgttctgggatatacaagatgaaacttttaagtaggatgttttagtgtattctagagttggaaagttggcatcattatgaatgttctaaagaataagtgccattttaaaccttaccaaaaaattggcaagccaaattttggtaaagtttgagtgtttggtttataaccaagtttttgtcaatgttgcttgtgatgtattgattgtttttgccaaaatattggcaacacaaaatctatggcaacaaaccaaacacacacattttcttgcccttgccaatttttttgtatagtttgtttgggctataaaccaaatgctaagtgttcatgtccattgccaaaccaaccctgagtattaagcctatcattatgatctacacttttcgttacattttcttctattgaatgatttcttagaatatgaaatttcactgtttaaagcttgcaaatgtagcatcatttgagtttgctaatggttaatgtttagcatgatcacaggcaattatagtacactatagtaaattattgtctggggtttgcttattggcttttcaggccatgtcccattcctgtgatagcccttaatgatcagttagcatgcattgcagcttgctccaacctgtttccttagtatttactcgtatttgttacctaatgatacatgatgtgtacctattaaaaatgcaacataacaacttcatagttgcttgtttctccaataattaatctgtcctgcctggttagtgtgtggtatatgcgcaccctctaatccacttgttgctttcgaaaattaattgcaggaaaggaaacaagtagaggaatcaattgagaagcataggcaggctgtgaaagaggtgattgaggtacagtttatctgctcccatagatttcatgtttcattattgctgctgcaaatgaaagttcctagtatattttatttagagctttgctacagctgatgtgcgttctctgcagcattatactggaatatcctctcaaatcccatctggatctgcaatcgatgagcagctgcgttcatatttccttgccatcaaagctgttgaggagtctccgagtcccttccaagatggtgcagcaagccagacaccatctgttgaaagtgccgatgtggatgcatctgcagctactgcaggttcctttctgttcaatttttcattccacgctgctagtgtatatttaatgatctctattagttaatcatagtatctgttaatgacatgtgatacttactagttcagaaattatattagatctgatctattacatgtactcttgaactcgatgtgaatttggttttgaatgatttggcatgtcagatattgttcggacttcggaatgtgatatgatattggatttctaatgcatcattttcttgcattggttccatcgcgtggatctgaataatgtgtttttcctttgctttaccgtcacttgatcaatatggtagttcataaggctgctgcttttttttttttctaatctcagggagacaggtagctactccaccaaggcctgctcaagttaaagtggtggaggagagagcagtttctactttgcccaaaccaagcactgaagtacgtagaccaggaggaaggagaccacttgttcgaccttcacttgaacgagttgaagaaccccaagctgatattgatacaacagtagttgaaggttccacagagaaaggcggcttgttgatggagcgtgaaactcctggtggtgtatctgcgttacagccatcaagtcgtaaacgtctaattccatcaccacaaacgagagatgatgcttcacaaggagagacaacggatgccaatccaccactgaagaaacccaaagaaggatcttcacaatgtactagtgagctaaaaactgaacagtcacctcatgaagatgtcatggcacctgttcctgtgctaccatctacagagttagatgagcaacagcctggagaagagatggacaccgatcagtcttccttgccagttgaagaggttgaggaaacaagggaggatgacttgggtgataaggatgacatggaaacacatatagacgcttcaatggacatccaaggacaagatgcagaaactggtattgataatgatgcaactactgtggaagatgtgccagtcaagtcagaagcggttatggaatcactggaggaagacctgaaaactgaggatgggaaggaagagggtcagtttactgcaaccactgatgttgaagatgagagggaggagggagagttgccagatgaaccagaacaaccagacagcactccccctgtgctggatgttggtgagcaagccggtgattctttcagggcggcatctccagcaggaccaactgaaaagagtgatgttgacatgccagaagaaactggagaaggtgatggtaccatggaatcagaccaaagccctgtaccacaatctggtggagcagatgcgtcaccgagccaaatggctgatgcgtcaccaagccctgcacgtgaaccttctcctaacccagtccaagctggtgcacctcctgaacagcagaatcccacccctcctaacccagtccaagctggtgcatcttctgaacagcagaatcccgccactgcagcagaaggtgttgaaactcgtagtaccagaacaatcaacctaactgagagagcgaggcaaaaccggcaagccaggattcttcgctcagccactcaacagaatgcaaggggccgtggcaaccagtctcttacatacagggtatggttttatactacaagactactgagtttatttctgttgtgttctatttttgttatatccagtgttaattctgatggagaacaatgttttctatgtgcagaaagatggcggccgaggaacacggggtcgtggtgggcgtggtcagtcgtagagaatttaggtttgtctttgctcaagcgcggagactagttttttgcaaaggacatactgaatcagggcggcatcatattcattttgtagcactatcagaattgcgagcgtacatgttactctgcttagacaaattcatgtggctaagcagcgcttattaaaatgttctcattgcccgtgcggattgccagatgacctatatttaaattgaactctagttgacaaagatgatataagcattcgtagcgcgtaagc

SEQ ID NO: 26 - protein, 677 aa, Oryza sativa
MKDELQNIKATLRENSAELERTKKLLSEKDSVIRNLEEKLAGCQSELDAREKKLNDVEASLKSEIDRHRKININIKRKLDASAKEKEELTKEKQSLSKQLEDLKSTGQKTTTENSNEQAIKEKDFRIQTLEKVLEKERDDNKKEKAFRRRNEKVFTTAIQNMNQERKQVEESIEKHRQAVKEVIEHYTGISSQIPSGSAIDEQLRSYFLAIKAVEESPSPFQDGAASQTPSVESADVDASAATAGRQVATPPRPAQVKVVEERAVSTLPKPSTEVRRPGGRRPLVRPSLERVEEPQADIDTTVVEGSTEKGGLLMERETPGGVSALQPSSRKRLIPSPQTRDDASQGETTDANPPLKKPKEGSSQCTSELKTEQSPHEDVMAPVPVLPSTELDEQQPGEEMDTDQSSLPVEEVEETREDDLGDKDDMETHIDASMDIQGQDAETGIDNDATTVEDVPVKSEAVMESLEEDLKTEDGKEEGQFTATTDVEDEREEGELPDEPEQPDSTPPVLDVGEQAGDSFRAASPAGPTEKSDVDMPEETGEGDGTMESDQSPVPQSGGADASPSQMADASPSPAREPSPNPVQAGAPPEQQNPTPPNPVQAGASSEQQNPATAAEGVETRSTRTINLTERARQNRQARILRSATQQNARGRGNQSLTYRKDGGRGTRGRGGRGQS

SEQ ID NO: 27 - DNA, 10365 bp, Oryza sativa
gtttgcgtttcctccgcctcctcactccaattccattcgccttccgccaccaccacccttggctcctcccctccccgcggggcgcgcgacaaaccctagaaccttctagaggctagagcggtagagccatccgcgagggccccgggcgggctaggggcgccgcctacccgaccccgcacgcggcggcgatgccgctcttcatgtcggaggaggagctgcggctcttgggcggtgacgtggccgccgtcgccgagcgggccgacgccgccatccgcgagctccggcagcaggtggacaccgtccgtgccgaggccgacgcggcggccatcgcggcggagcagacgtgcgccctcctcgagcagcgctacgacactctctccgccgaggccgatcgcttccgggccgagctagccgagctcgcggctgcctccgagcgccgcgccgccgatctcgcctcttcccagtccgagatacaccagctccgcatccaagccgtacgaaccctagtttttatttgggttcagctcagtttttcggcttagctgaggtcacactgatcactctgtgctgctgatggggtttgcagattgcgaaggatggcgagattgaacggctgaaagtagaaatctcggaggtgcacaagtccaagtcgcagtcactggaactaattgagcagagggatgcagagataagggagaaggatggcatcatccagaactacctcgataaaatagtaagccatcctgaccattttgtactcccacttctagtgatgcacagcatccagcaaaattggaactccatatctaaggtgatgtgcgaatataggatcatatggataagttgttatccagtgcaatgcctaggttgctactgtcgacaaacagaggacgggggttttatgatgttctaagacttgaagtagctttccttttaaccctagtcagagggtaggtcagttgcttgataggttttacaacagaaattttgtggcttcaataggccacaaaatttgttttcctcattttgcatgttacttggcagaagttgagttgcatgtgtatgagacacaactgcattttgtatgagttgttacccgaacgtcagacatgattttaactcgatttacctgtagttttacgtctgtctccatacttttttattttacatgtagtagcaagttgaatttttattttatttatgcatcagaggtcatccttatcggatacttcaaatgaaaaatacacatttaaattatttttcgtaatatcagttactggcattctatttcagttctttgggcattgcttagttgatatgccgtttcaataaataaaacgtaccatatgaattataatgactttgcaattttaaataagttgttgctttgttgtagtgttctgatcgtataactttacatgctactttttttttgtgcctatcatgaacattcatatcagtctagactgtttaagatactcaattgtgtatcgtaccttacatgttatgtatcattccttgcatgttgcgatcaacttttgagtgtcggacttattgtatgtaagatatctgcgatactgttagatctcattgcctagtttggagtattggagatttccccgattcgatgtaggaatattcatttatttccgtaaaattcatttgttccaattggacccatactttttcttaaaatttactctgtagtttttctgttggataattttgaccttattaatgtgtcactattgaaccttctgtataatcaaggaattcatgtgatttggtatgcttatattcaatatcattttattagcaatcgcaagcgctaggccttattcactctagttggtaagtcctttagtttttcgcatttttgagatatctatgccctttcatcctgggaactgggaagattttgttttgcattttgttgcataaattaactgtagttgttgaatcggtcttcctgtcaggtaaatctggcagactcttctgctagtaaaggggcaaggatacaagaagttgaagctaagtttactcatctgcaggccacatgtaaccgaattacgcaggtatgctataaacaatttggtgttattttgctgcgtaagattgtagtataaggtgatgcaaagtctttcttgagttgtagactactacctaatctgttatccatggagttttactttaattgtacctattccatatgtttgcacagagcaaccgttggttcttatttagtactttcctgtttaggagaaagatctgcttgaaaagcataatctctggcttgacgaggaacttaaagaaaaagtgaagaacttagctgaactaaggaaatcaaacatggatgaggaggctaggatgtcagcaaaggttgccgaggtgagtcctattccaaccttgacatgtgacataatgcaagcagaaagcaaaacctgattatgttggtttcagcttgaaagagagacttctgaatcatccagttccttgaggcgaagcaaagaacgggtttctgaattggagcaaagggtatcatatatggaaaaggtaaattgtcagatttgttagcttttgtattattgccatcatctaatttttgctttgctttgcttttatgatctaaaggagttgtgctcaacaaaggatgctgcagctgctaatgaacaacgcctggctgcagagctttcaactgtatggtttacctttattcccattaacccccccttgtttatttcacccttactgctcccactccctgcttgtttaaattttagaaaggaaatggaagaaaatgtgtgctgagctatttgtactagaccagcagatcagtccatcgttattgtatatgcacacggcacaccacaacttaacccatctagtgtatctaggatatttctttttttttaatggaatgcactgatgttcctctctataagccaagtcgatgacgcttttaattattgccttttgttctgtttcccttaaaaggtcatgaaacttgctgaacttcacaaagaaagttctgaggaatggtcaaaaaaagcgggggaacttgaaggtgttattaaagcattggaggtaatgcctttacttgtatttaattttgccccgctcatgaacatgaaaatctaattattcttattatttttttcggtgtaaaccagacacatttgacccaggttgaagatgaatacaaggaaaagcttgagaaggagacttcagccaagagggaccttgaaatggtatattgattattattttggatggttttcttattgaaaaatcagtttgatattgtgagtttcttagttgatcttttggctttcatgctattcaggaagctacctacttaaagcaaaagcttgaaaagtgtgaatctgatctggagaatacaaggaaatctagtgaattgagcttcactccattggttgcagcagacccttgtgatctagcaggctcaccgatgaaagaaatgtattatttctgaaactttatacttttagtctagcgagatatctaaagcaggcgctattagcatagctaagtaacactttctagagagcattgttcaaggctttttgatattaattgtgttttgctcattaaagcttatcttattgaatgatgttaacttctgtttgtgctgtaccgttgtaaacatgatattatctttgtcccaacaccaatagttcccaaacattttgtagtcattccttattgtgttgataagtcactgatcatatctagctggtgctagggaaaaccatgatatgcaatgttttacaaatcataacagaaacacaggaaggagtatgatccaattattaaacaagaccttaattttcatctattttgaaattctttttgtttcctatttggcagggcattttctgatccagcaaatcagaatgatctaatgattgtaccaaaagtacctactggtgtttctggaactgcattagctgcttctcttcttcgtgatggttggagtgtatgtccaatctcctctatactgtttaatctgtgcatttacgtttcaaatattacctgattaccttcactgtgtcagctcgctaagatctatgagaaataccaagaagctactgatgctttgcgccatgagaggtttggacgaaggcacgcggaagcagttctggagagggtacagttctgttctcgtcagtttatctcttaatttgtattaatctctactctctttcccatgatcccatcatttccactttcctaatagatgttttagacatcaaaagtcaaaacagctttaaatacaaactttcaaccgtgccatattctatctatgtaaccacatggaagtagtccctcctctgagaaggttgaaatgcagatttgctaagttttgattacaaactcaccataatatggatagtcaaaatttcaaataatcggattatacgcattctaaaatgacatttttttgagatggagggagtacatcaattttcgcagatttacatttatttgagatggagggtgaacattaattttcactgatattctccaaggtttcaaatttatgattaatagttgatggtgtgagaagtgtttgtaaagtgcatgaagtaaacgcacatgtagtcctgtatcatattttgtgctaaatgggtaatcgtacttgtgcagggatgctctgttgcttttctcattgattcatttctgaagtgtcctattcctgttggattactgaattatcttttgttcaacaggtcttgcatgaaattgaagagaaagctgagcttatcttggatgaacgaggtaatgtgaaatgcatacattgcttcattgcctgatagtacactgattatgcttaagtttggacatgtatgcaattattttgtgctcaagcatatctttgcatttgaccctttcagctgagcataggaggatggttgaagcttatgctctaatggatcagaagttgcaacaagcattgctggagcatgacaattttgaaaataccattaggaatctaaaggtgcgtacatcaattttctgttaagtatagtagtctcccatagtgaagttttaacaataatcttgtttttgcagtcagagttaaaaaggcgggaacgtgatcatagtattgctcagaaagaaatagatgatctgcaaaaacaagtgagtctttaagcatgacatctgcattttgttctttttgattgattcacagattaaattgtctatgtaaggaaaatagaaatgttaacctcttgcctactctctagatatttaagatctggtgcaacttgatgtgatactagttctcaccaacatcttttcaaggatgctattctaaaaggggtggagtccatttttggcacctaaatatttcttggactctaaatttacgctgaactaaaagatcggttttagttcaccttcaacttttatttataaaaccagacaagtaacacctcatacctgattccatggtggtttagttgagatgacatggttttcactgatgattagcttctattagctgagattaattgatgtttaaccagctatttgacattcgcaccaacacaagcttgcatattaggagtctgcactagcaaaaactattatgatatcaatggaaaccactgtggagcagtgttgaaggtattaatagtatttgtatggttttgaaagtcaaagggtggaaaacactagcttttcaatttgaagttaaaatggacctagaaaagagtccaagagccaaaaatagactatgccctttgaaaatatgtcgatgcttgtggtcctcacctgttcaaatataatttgaaggtggatattcattcttgcatgtcactactgacaagaacattgaatcaacatttcttttgtggtactgcagatgcttttgctaactatatgctgtgtctgccctctaaatatttgcagatagctgtccttttaaaggagtgccaagatatacagcttcgttgtggttctagccttccaaatgtaggagatggtgctctttctacaagcacaagcactggagtgcctgaagttgaaaacaatatccatgagcatgtgagtatgctagtccgttgtattctctttcagtttcactgtgttggtgcttgctttaactgttcgatactgtgtttcagatgacattcaatgatatcaatgggttagtacagcaaaatgtgcaactccggaatcaagttcatttgctctctgctgatcttgataaaagggacatggaactcagggtatatataaagtttgactttgttttttctatagtttcaaatgttttagtttgttcatacatcagtgtcagggcatacttttgtatccaatgacatgagtacgtgatgaaaaatatctcgtttctgtactttccaggagagcttccaaattgagttgaagaagattacagatgatgctgcgtccagggttgagaaagtgatgaaaaaatccgaagaacaagcaataatgattgaatcccttcacagatctgtatgtttttgtattctccttgccacgaagttggaaatcttcgttttgaaaccctgtctgcaaaatttcaattgcatgctgtatgtgataccagtcctaaaatagttctcttttttgtaggtagcgatgtataggaagctgtgtgaagaacaacagaagtcacgttccaatgttgaacacatacccaaaaatttggaaggtttgtccttctgatgttttcagttcaggcaaaatggttaaatgtctaaccatgatggtttcaactgcatgttactgctataagaaataacctacatgtgatggttttattttgttctctagatgatggcagaaaagacctgatggttctatttgaaggatcacaggtaatttttttgatgatggaaggcttattgaggctttagaataccatagatgttgtggtgtcttttttcaaatttcaatctattttgaccaggaggtttcaaggaaagcttatgagcaagtttcagagcgtgccaaaagccttgatgaagagctgactaagttgaggtggtgttttcctccccttttaaatcttattggcatgatagaataacagctacgggaagaagtcatttgaataattttcattccgatgtatcattggacaagatgaatactgattacgaagcaatgtaacaacatccctttgctaaaaaaaaagtaatatgaacgactaaggccctgtttgtttcagcttaaaattattataatctagattattaagacatattactataggctggattataataagccgacatagaataagttgttagttgtttgttgctctagattattagctggttgttaggtgttagcaacccaataatctaaaaaaagcacctttagagtggattactagattatagtaatctggcttatagattgtaataatctatcataataagctatctgtttgtttcaacttactcctaatagtccagattataataatcctaagctgaaacaaacagggcctaaagcattaaggttaactttctatggtcttttcaaactatagaagtttatgtcatgaaaaataatttgcaagcaatccaacgtacttattttacgtagttagtccatatacttttgcaatatgaacgactaaagcgttaaggttaactttctatggtgagctacacttggaaatgcacagatcctatgctggcctacatatgtagacaaagggagtactggagtactatgaaacggatatcttgaaatgttgttagtgcccagctctgttgaggtcgtgtcgttataactaagcatgctgacggaagtgtgaatgtagcactccctccatctgaaaatataacaccttttagcattcaaactttccccacaatataataacttcacctattcactcatctcaaccaatcacaacaatctctcgggtaaatctaatgggcgggtgatcgctgggagcgatcaacccgcccctcccccctatacgctcttcctctcccccttcctcctccccttcttctcttcctactacagtacaccataaattttttaaaaaataaaaaaacaaagttggaaaaatttatgtatagaaatactatatataaaaaacatttgaattcaaattcaaattgaaacgggtatgtaaacttttgacttaaaactttaggtgtataaactttagatgtgtaaacttgaggtgtacaaactttaggtgcataaatttactaaaataggaaagtaatgcggtgccaaaaaaggaaaccacgtggagggagggggggatccgaatcctgatcgctaggggcgcttagcaatctcgcaatctcccacttaatttctcgacctactttctcatctcaactaataacaattttccccatttaatttctcctgctttcttaataccttgtacaactctagaaatccttatattttgtgatggagggagtagtatatagacgcacatctaagttatctgtgtcacggttggtttttaacttaccatgtatctgtgctgttaagggttccatttcttgttggttcttcatttttacatgattttggatggccctacttattgtggtatttggactgttgttgattatgttatattatatttgatcttgcatagaatttctgatcaatactgattactattcattaggactgagcttctatctttgcgttctgagcgtgataaggcggttcttgaagcagaatttgctcgagaacgacttaatggatttacagcagagcttgaacaccaggttctttctttgatgtgttatatcatgatttgttaatatttatgtttgttacactgaaatggacataataatgtccataacagtcttttggaagaagatagcatttattacatgctgtatccttatttactttgtacatgtaaaaaacagaggaaggaagctaattctatttcgctaagaaatgcggaattgatgcatttagtagttgattacgaaaaaagattgcgtgagaactcagaatctatgaaggctgtagaggagaactcacggaagctattaatggaggtttgttgatatttttacattcctcaaataatattaagacccagagtcctgacatgatttccatttctctagatgtctattctaaagaatgaaaaagagatcttagcaaagtcagagaaaaaagctttggaggaagttcatgatttgaccacgagggtgcatcgcctgcaggtatttcccttgctgccatatcttttcattactttggagtttcaatattgtcttgtaccccctccatccaataaaaaaagcgtgtccatgatcgtagctagggttggtctttttttgggacggagtagtatgtattgcagtttctgttagtttgttatgtttccaaaacagttgtaaaactgttatcgtcaattatattctatacttatgaatatatactccttctgtcccaaaaagaattaatttctaggtaagaatctgggcatagactatatgtccagattcatagtcagaaattggttcttgttgggacagagggagtatattattgttatgctctttttgaaaggataatttagtacttttcgtagctctgccctatatttctcatgacaaatttggagctgtcagtttcgcacaactgtatggtctactcaagcatgaacaagcaagatcttttagctatttgtgtttttaatttgcgatctcaaataagttaaatgttcgtgaaacaaataaaacatgtcaattactttgtcttgaggcttttataaacttgcactgacttgtatatatgatgcattgcaggcgaccattgacacaatacatgccaccgaggaggttcaagaggtacaatatgtctagatgagtcacattaatacttgaaattcttctctgtctatctcttaatctgtgaataatttagaatgcaaggtctattgaaaggagaaatcaagaggagtacatcaagagactagaagtaagactcctatttggcatcacatatgctttagtattttgtgcttatgtagcttcgtcattgcctctcctctcacattcaagctgttcttagctttaaaatgtaatttcctgtactgataccttgaacattgagaatactactgtgactctgtgagatttgttctctttctgcatgctcattgtggggatatattgctccatgtattccttctgtatcttatcttggttgagcttattctaatttgaaatgcatccatagagggactgggctgaagtgaaaaaagagcttcaagagcaaagggatcatgtccgcgtcctgacgcttgataagaaaaatgcctttgacggatgtctgaagcaggtagaggatatg

SEQ ID NO: 28 - protein, 501 aa, Oryza sativa
MPLFMSEEELRLLGGDVAAVAERADAAIRELRQQVDTVRAEADAAAIAAEQTCALLEQRYDTLSAEADRFRAELAELAAASERRAADLASSQSEIHQLRIQAIAKDGEIERLKVEISEVHKSKSQSLELIEQRDAEIREKDGIIQNYLDKIVNLADSSASKGARIQEVEAKFTHLQATCNRITQEKDLLEKHNLWLDEELKEKVKNLAELRKSNMDEEARMSAKVAELERETSESSSSLRRSKERVSELEQRVSYMEKELCSTKDAAAANEQRLAAELSTVMKLAELHKESSEEWSKKAGELEGVIKALETHLTQVEDEYKEKLEKETSAKRDLEMEATYLKQKLEKCESDLENTRKSSELSFTPLVAADPCDLAGSPMKEMAFSDPANQNDLMIVPKVPTGVSGTALAASLLRDGWSLAKIYEKYQEATDALRHERFGRRHAEAVLERVLHEIEEKAELILDERAEHRRMVEAYALMDQKLQQALLEHDNFENTIRNLKS

SEQ ID NO: 29 - DNA, 9 bp, Artificial sequence
  potential SPL3/SPL14 transcription factor binding motif nucleic acid sequence
  misc_feature (2)..(2): n is a, c, g, or t
tncgtacaa

SEQ ID NO: 30 - DNA, 35937250 bp, Oryza sativa (residues 1-2,113,956 of 35,937,250)
  misc_feature (5969519)..(5970518): n is a, c, g, or t
  misc_feature (13681864)..(13682863): n is a, c, g, or t
  misc_feature (13684155)..(13684254): n is a, c, g, or t
  misc_feature (18795366)..(18796365): n is a, c, g, or t
  misc_feature (24815509)..(24816508): n is a, c, g, or t
  misc_feature (35936251)..(35937250): n is a, c, g, or t
accctaaaccctaaaccctaaaccctaaaccctaaaccctaaccctaaacccctaaccctaaaccctaaaccctaaaccctaaaccctaaaccctaaaccctaaaccctaaaccctaaaccctaaaccctaaaccctaaaccctaaaccctaaaccctaaaccctaaaccctaaaccctaaaccctaaaccctaaaaccctaaaccctaaaccctaaaccctaaaccctaaaccctaaaccctaaaccctaaaccctaaccctaaaccctaaaccctaaaccctaaaccctaaaccctaaaccctaaaccctaaaccctaaccctaaaccctaaaccctaaaccctaaaccctaaccccaaccttaatgaagcaatgcacttgtcttggctcaatcaaccctcccgacaccaacaatggatgaacaaaagctcaagtggtgtgagagtggatgcaaggggtgtatgcaagtgaagcaagtgccaagagggtccccttcctactcgttggggagtatttatacccccacccaccaaaactagtcgttggggtcgaaatcgccaaccttagttgccgcctgccagtcagatcacccaaggctagaaactagcctttactgtgcacttaatgcacgggcagcagctagccagtcagatcgccatcggctccagtcaagccgtcggcggcccggtcagaccggcgtcggctctagcggctctagatcgtcaagccaagacacacatcccggctcaccaaccgcccggtcagaccagccaagaaatgccagtcaggccggcatgaagccctcggtcagaccggcctcaagcagaaaatgatgtatgaaatgaactcgaacgaagtgacaatgcaagtgacctaatgtggcattttgatcaactctttacctaggtcattacctctcttgatagtacggcaaagctagaaataaacctagcaaaatttgatcacctaacacttcaatcaatttaaaacaaaacgctagatttaccatctttgttccattgctttgtgccattaattttaatccgcggtgatcatccatggcatgtacatcatgtggtcctaactcaaatatatcgcttaaatagaatagttagtccacaattagagcttgtcattaactaccaaaattaacaacgggggctatgatgcttcaatgtgctatatataatatgactgtagtacattgaatattttatttcattgcactcaaatataatcaatgttggcctattttacaaatttattattctggcatatcactacaagatctaagtaatactgacattttgatccatgtctgctttgcagacaatttttgtaaattggtatgatctaagaaattaattatacttgacctcagggtctaaagaaattaagccttaacaacattgtgaaatgcagtgagactgaatcttggagataaattaccgaagaactgaacttttattgtgagtataatttacttttgatcttttaacaaataaggatattgtttgttagtggttctagatttggttaccctggccttttctcatgagcgcaattagggccgaacttttgtgtggccttgtcagagtgataaaaaaaacataggcagtgcatcacttatctgaaaaattggttctgaattttccttctctatatccctcaggaatgatactaaaatctgatttgtgtactgacttatttcagtcatttgaatttgctatgtcaatacagtccatttttaataaaatctggaatacattttgaggttaagataatccagttgtttatagactcaaaaacagtatatgtgctctagaaacatcgaaactattttatcatatcaaaacacatatgttcgtatggtataatttttaactctccaaaatttaccatctttaattataatttaaattgcatccacatgtttaataaaaatatttgagcatccattttgctattttgcacacttgcagttaagttctgagatatataatgatatttggctgacatgctcattggacctttttccttaagctatacttctgtgtcttttaactgaagttgctttctgtttcgtaagatcagccctccagcaagtggaggtaatccagtaggagtcctccatttctctatatatctctttgattgctttaaaaccgaacaaaaaggtttaaagaaagcaaaagaagcaaatgtgtccatttatctttcgaaacaatatacttctttcttggtgcatggagggccagacaaccagatagagaaatggagactctatcagagttgtatgttcagcaaagatgaggtggctgattaagagttgtctaattacaaccagtgcattgttgacaatcttgatttttttttaatccttttgtgcatctggggcaaagttatttggtaaatttgaatatgattttagaatttggtgaagatatctgatttttaactgatttcggatgctacatgcaatgcattgtgcttctgtaatatcaaaattcacgattgtatatttttattttggtgatatatatgccctcaatagacttaaactttgacatgttgatcactccgtaataattgtgtgccattctatttcttttatattatgtttttccaccgttcatgttactaatatgtgaaaaccatagaaatggaatatagctattgtctgtgttaacaatgatgtttatgtttgcaacgggggttcattttttatcatcccacccattaagatttaaagttgctctaattatttccaattgcaacgcatgggcacccagctagtaattatgaaagcaagagacaagtgctaaaggatatttgaaaactaaaactggctcattcacagctggcagcaccactggaaattcaagcaaggacaaacaacaatacagacacatgaagatagaagatagaaaatagaaaataagcgttcagagcaggaagttcccaccaacatcgctcctctatcctgtacaaaacaaaacaaggatagccggccaaatataaaactagccggctacacttcacaaaatcacaaccaaaaaaggcactataaacatagctaccatcatccatccaggacgacagaatgcgtctgctttggcatagctaacttcaagtcgctatataccataacaattcctcctaaaggagatagataagggagagcaaggaggaagaagcgaagagcgaagaagagaggatgacatgtgggcctaacatgtcagtgggtcccatattttgtgtgaatgatagataggttccacacgtattttttaattctaacgccacgaagcgtcacgtcagcaaaaccatcctccaaaaccatggagggagttaaattacaccgactccaaaaccatggaggaagtcaaattacaccgattttaatagttagagaatcgagatgtccgttattgtagtttagggatacgaatcaaattcggtcctgctagttgggccaaatgggcctcacaacaccatgcaatctagtctagaccatctcaaatcgatcgttttgcctttttactgagattatgccctgatatgggacaaccagtagtccagtacaatcaacaaatatcgaagttgtttcaaaaagaaaaaaaacaaatatcgaagccgtttcgtttgcttttattccattcgattcgattcaattcgttcatctcaacatgcacatcgtccaagctaactccttaccggaatactctctatagaaagtagaaaccaactttggattcctttctgctgcccctcaggccctcgcatacataaaaagaaacagccttttctagagagcgtcgttgccttgttcaaaggttgcaccaatgccgctctacaagactacaactcatccttgaaatttgtaccggaactcctctcccccctcaaattagttgaagctgtgctctgatccttctctgttttcgttgctgacgaatccggccgcttcagtttgaaagggatgctagcgtgcttcttgataaacttgtacatctccaccaccgtacggtccccctcaaaagtaatctgcacacaataacgcacagccaaattaaataaggccctgtttggttcccacacaaaaattttacaccctatcacatcgaacgtttgaacaactacataaaatattaaatatagactaaaaaaataactaattgcatagattgtgactaatttgcgagatggatttttaagcctaattgccccatgatttgacaatgtggtgctacagtaaacatttactaatgatagattaattaggcttaataaattcatctcgtggtttactgacggattctgtaattagtttttttattagtgcgcaaacaccctatgcgacaccctatatacccgatgtgacacgccaaaactttacacccctagatctaaacactccctaaattagacttctggtaaatactgttatatacggaccctttcaggatctcaaaatctcataaacataacttgtcagatatacgcctaacgtatcttgaattccgacctcaacaaatgttgttttaagggaaagacctcaacaaatgttatagcgcagaatgacttcaatgccataggtgcagccgtgcaggttggatttttttttagcaagaaaccaaggacacgcatgcagtttgaatagtgcggtaacatatagtagagaggtgattcaagatttctacagagagagagagacagatatatttcggttttagcagattataagaaatctaggcaattctaccgaagagagaggtaacaaacctactgagagacagattacatacagtaacaaatgcacccctcaataagacatgacacatatttgggcacttacaggctcaaaacttttctttcctgctggataaaagaggatcgttgggaatccatcaggctgtgacaagaagcaagtgttaattctgtaatatggaaagtttacaacataataaaatggaaaaataaacaagactaagcatgcatgcatgcatgcattgaaaatttaaggaagataatcacataaaagaatagtactagcaaactatgagccaatcttgaaggttcagattgcatggagattggaggggaaatgaattgttccaactacaagtcaaatttcacatgctacagtggtcactactgcctcaaaatactgtaccactgatgcatactcgtgagatcgtagtgcgtgaatacatatacatggatgagaagtaaatcaacattgaaatgtatgtagtattagatgatggatggatatgtaccttttttgtgcagtgtgcaaaagtgcgatttcgaataacaaagcagttgagcaaccctcacatttttcataactagcggtgtttcatatcatacatgcacaagatcttttggccacaatagcacaggaaattaaactcttcatttcgtgcctccaaattttactttctaatatccagttcaaagaaaagtgaagtgaaactgccaaaaccaacaggaagcagaacagacctttgcacgtggatgctcattggcagtgccatccattttagctattacaagggagtcaatgccacggagatgctttcctagcttgttgtaggtaggctccagttcctgacaatgcccacaccatggtgcatatatctgcaacaacagcaacaacgattatggaccacatataaataccatttttctcataatttaccttccaggaagaacatacctccaaaagggcatcttttgattcatccaaaacaatctgatctaggttttttccaacaacaattttgacatctccttcattctgtatgggaacacagaatgtctcattatggtacaataagtggagaaagaacccatcatataattatagactcacagattcaggtacaggttcagacttgtagaacggtgtgagcttttcctctaagaaatcctcagcaaatctctgcatgtaaaaaggataaaaacaataaaggtgtccaataaccaagccttcaaggaataagaaaaattcttggagaatgatagtcgactccttcctcactagcagtggcagaactcaatatcaacagtgtccaagaaaagtaataagtaccctagttaaaaggacaacttctacaccaaacggcatggtgcataaattgcaaaaagatgcacattgcatttgttcactacaaaatgcaatattaattgataatgcacaaaccacaaatacatgcaagattctcaggttaaattaatacagtacaaatagaaaatgcatttgccaaaaaaactcaaatgattggtgattacatgctagcttgaaacttggtaacataatgaacaatttgttcgaactacttgagcacactcctatgctatttttacatctaataaggcactgtgcatgggcctgtgtcaacaattaccttaatattctctaccgatatttcaccatcaaggaaaaaattcctagcatcttcattcccagtgtaagcaagaacctacagtcatagggacaaacaaaaaaataacacaaacacattaaatggaggctaaattgcagcatccaatttcgatgcaagaaacaacagtacagataaaggtaacaaagaacacaagtcattactgtggtctcttgtccagtaataccaaagtagttggcaactggttcacctacttcctcattgtcacgctccacaaagacaaacaaaagctgcattttggccacacacctcatcagtggtaaacgaacacatcagtaaataaatagaatgggaaagtgataagtggtgttgcatagcaccaaatttgagtaaagcatgtgaagcaacggaagtaagtttgctgataacttgacggatcaaaagaaaaaaaaactaccttccccttgaatgattttgatgcttccttaaagatgggcagaaatttcgacgattcgtttgcaacaacaaatagtaaaatctggtttgaaaaataaaagttagcagcccagtaatgtataaatggaccaaaaaagtgagaaatgtacagaagcaatatcaattagacatgcctgcttcttgattggattgtcaaaaatggaaggagcagtttcctgtgtgagggtgttgaccaacggaagcttgtttgcagatacaaaatcggcaattgcagatgctttgaatggcccatctgcatgataggtggagtatattatccaacaaccaagccccgcatggaaaatagaaatgaggggattgatgcttaaagtgacttagagagaagggtaccatagaaggtcaacttctcctcctcttgtttcttgagcaggactaaggacgggcgcttggccgctgggtcaaggtgaaaaagcttggcaacatcaggattggaagtctggtaaaagttgatagcatcttccagcctcgaagcagcagcaatctcatcactgtgagcaccctgtaagtagtagggtttgaaaagaagattaataataatagtgtgtgtgcagtaagaatttagaaagagcatcggggttgacttgagtagaagagaagagaaggtaccgatagggagtcgaggacggcaagaatggccttgtcctccccggtgagtatcttctccgcctcgtcgacggtggtgatgttttgcaccccgggagctagcttcttgttgacccacgacacgatggcttccctggagccaaggcaagagacaagtcaaagaaattgaagccaagagacgagatgagatgggatctggggggaggggggacacgcacttggttcttgcgccgttgtagtccttgggaacgccgtcgatgaagaagaggatggtggggaagccctggacgtcgtacttctgggcgagatcagtgtcctcggtggcgtcgaccttggcgagggcgacttgatgggcaagaggggagaggtcggcggcggcggcggcgtagtctggggcgagcgcctggcaatgggcgcaccagggggcgtagaactcgaccatgacatggcggtgggaggcgaggaagtcggagaagttggcggcggagaggaggaagacgtgggtctcatctatgggatggtcctgggcctggccatggtggaagaggtcgtcgtcgtcgtcgtcgtcgggggagccctcctggagccagccgtcggggtcgttggcggggatgtcgtcggcgttgtcgatgaggtagtcgaggtcgtcgtcggaggcggaggcggaggcgtggagaagaagggtggcgagggcgacgaggaggagagatcgggagcgcatcgttgcttcctccgttgctcactgagtccactgctgtggaagtggaatggaacgctctacaactacaagagcggatcgatccccttttatttctctctctttttttaattttcgataagagccagagctttctgtttgaaaagagaaaaaaagtcgcttgcgactcacacagccggaccccggagctcggagcgcgtggtgtgcggtgccgtccgcgtgagctgccacttttggaccggatctggcccagtttctttctatccgactgcaggcccaagcccattccatatttgagatgctttctccgtcttcgaatatgagttatatctggttttacggttgagtttgtggacagtatcggtgttggcgttcatctatcccttccaggacaggcggaatcaaccatgccgtgcggcgtcaccaacaagaagccgccggcccactgcccttggagacgacgacaatgaacagtcggaggaacaccctgccaatgatcataaggatgtggctgtggtgccgtagcggctaggcggagtcgaagtgcacgcagatggtggcggagaggatgccatgcgcgccagcaatgaggaaggtagaaacagggcggtgagagccgccggaagggcgagaaagaggaggcagagagagaagagggaaggggaaaggtgaggaagaagatgaggtgagtagtaactcgctgacatgtgggttccacctgctgagagaagaaagcgggctacatattttcaaaaccacttaaggagtcaatttgcacctattttcaaagagagggaggtgttatacccggttttacggttgaggaagacgattcaatcatgagctagatatcaagggaggtgaaatagacttatttccttgtgtaatgaaataggtagacataacgaaagtaactttcatctgaaaacccttcaggatgaaaaccactatacattcagttgactcgttttacctagcctcctcctgattttcattttgcttttaatttgttcatctttttcaaaacatggctacagaaaagatacacacaatctaactaaccactatcatgtacacaagagattacagttgagttcaagcatccgctacaaagattggcttcacaaagttaaaacaggtggggaggaaaaaagagacccacagcccacagcttacccgaaagccaaataccacgtagcattgaaatgatgcggcaaaaaagaggaaaacaaactattggctactatgctcttcacacaaatcaatgaacatctcactcacattcttcactagtcgagggtcgtcaaaacaagatcccgtgacgagtcagatatcctagcagcctcagcaatcctgagggccataatagatttgtatgccaccagctcagcctttgccatgagacgctgagctctactgcgcagacgaacagctgtttctcctgcctgtgttgcagcacgttcggcttccacaactctccgcaaagcctcctcttcagcaccattagcatctgtccatcaacatgtcgagtaaaagacaacacaagattatttcccctcagtaggaacttagtctgcaacatcgggataaaaaaacgctacgttatggtacacaaacttgcatgcatgtaccagtggaacaatggtcataaatgttactagtaattagtttcttcataattacagggagcatgctttcatcaagcatgatctggattgttttgcagtttgtattgtttgtgaactaggattgcacagatctgctgctacaggagttgaatcacctagcagatgagagggacaaggtgaagaataaatctgcaactattattggaaaaggatgaaaaagctacaagtgaacaaggtggtcttggcgacaagctgcgatgatggatctcatctgaatcatagttttgatgataagtgctatttgccctaaacattagcatttattaagggtttgagacactggctgaatagctaactgtaacctgtcccaaagtaattcaccgaggactctctcctcacaaggagcaagcattctattgttaggcctcataggagagttgtttcgtttgtgaatacataggcccaaaattactagtggttcattcaccaaaaatatgatagaacatataacatgcttcatattttagtagagttccttacataacattacacaacaagtattctacgttatatccaaggttcatatttatatatgccacaattagtgctattttattaactgtgtagtatctactaagggtggcaagtagaaatttattaccacctcctccccaaaatatagcaacttctggataaattttgggatggagtgagaagttatcatttccaatagatttgttagtttgccgattactacaaattatgcatgcatttttctgtaaccattcttatcaaagtaattatatatacacatgtttacacccaactatttccaactggatcgaatgtagctaaaataccatggccatctacttagcaactttgtgcaccttgatatggaaaattggtaatacaccagaggcagggaaactaacactgtaaccttacagatgctaaaatgtaggattagatataatattaggagtgcttgatatttcaggcatagaaggatgtggtttcttatgtgaaagaaaaaaagattcacatggcttccgaaatcaattgaggtcactcttcggacaaatggataaagaagcttcttgtatcttttatgatgctttcttgcttcaactaagtgaagggccacgccaatggcggtcccaattctctagtaagatagacatcaaggagaaaacatcagtaccttgcaagcatatgtcaggctttccacggccagcttggcttctttgtctcttgaaagatctttttttcttaatagatctttgtgacagttgtcctcgtcttagtgttgcaccctaatgatcaagaaggttaacatttagaaaatataaccagaagttcaggatatgcagacaatagagggtaatctttgtgaaggttccagctttgtattaatatttggggaagggataaagtcaaaaaatacctgcaatatccttagcagtggtacacctttcttatatctcttgtttatccaatattcatgcacagcaaggacattatggtccttttccaaagtagggtatctggaaagaatctgatccaaatcactagttccttcagggttgttgaaagcatccttttcaaacgtggtaatcatcttttcaaaatcttcataagaaatatgattaagatgtgcgctttttctgtcagaatctgaatgattcaactgggtgagccactgttcatcctcagaatccagatcatatacagagtcccttgagagagctcgcccaacctcatcatccgccattctgatatagtctggcacagggcgtgaaaaaggatatgttccaatcactcccatgtcatcagaaacctcatttacaccaggaattggtatcatctttccctgggaattgcgctcccgaccctcaatttgcaactccttaaacaaaagccagtcccatttatcagagaactcaatcttcaatccatcatcaactgccaaaatataggcatgggtgaaccggttaacaacataaaacctctgctccgaaggcttcagagatattctattgacaccatgtatcttcacagctatacaccactcatttgattccgatggttccagcataacttcagcgccttcttccctccagcacctatcaggttgaataattaaaaggtttgctctgcagtgaacagaatctatattctgtctaacctcagccaaagccaacctttcattcatgcgctcaatgggacttttcaaagaagacctcttttgcttcccatttgatcctataggagttgaaacatcactgtcatccatgttttcaagcaaatcaagagagatttccagtgctgctttaggtttgacaggctccagtggaagctccggactaactgagggtggcgcatccgcttctgtctgtctagccacatcggtctggtttgttgcaactaccttgtcgggaaatcttgcagcaagacgctgtcgactgaggggatgccgcatagagcttctcttcctttgatgcttctttagcctcagaccatggaccaccactcctgcaatctcttcaaggggcacataatcttgagccacactgcaaagtttgttgctacacaggtcaacagcaggatcagtatccccagtgctcagagattcagaatcctcctccaatagggtgcgaggataaatttcttcagctccaccaaccaaatgcattctcgtacgaatcacagctggaagatacattgactcgagtgctattaacaagtgcaaaatctggaagtaagaagggactgccaagaaattgacagacaacaatggttcagaatccttggcaccacgaagctcacaccagccacattgcaccaaagccctctgtgacaatgcacactgcaagaaaaggcatacacattaaccaggtgtacaaggaactaaaactggcacactttttaagtctgtagaaggcttacgtctctccggcattgaagctggacaaaatgcaatccccgcaatgcaagcgcagtggcgacagcatcggacgagagaaaggaggcaaggtttcggaccttgccccgtcggcagctacgcatccagcgcagcacagagaggaggaggcgcaagaagtgctgagagctcccagagcaagatgaatccacaaggacaataagcatggcagcgtcagctttattagtgggaatacaatccaccagggtcaagaaatgggaatcaaagaagccagtcctggaggcaaactccctggaagaggagcatgggatggtggcaaggtcgttcggggcgtggtgctgaaaaggggcgaccttgggtctcttcctagtgaagacaatggcaaacctggtgtcctccttgggttcggggaggcggcggcggcgcttcctgctgtagacgatcccgaaggaccttgtgcgcggcagaggcggcggcggtggcttggggtcgtcgtgaagttggcgttggtggtcatggacgtggaagcagttgttgggcttgcactggaaccagtgggcgtcggcgggggattcggagaaggcgaggcgcttgccggagcggaggaccctggcaggatcagaaggctgaggcggcctgggcgtcttgggcacgaagacgcgcgtggagcggcgggccccaacatgcggcatgggcacggcaggttcctccggcggcggcggcggcggcggcggcgacggcgatggcgcggggttgctggaggggacccgaatgcgatcagatgcagtgcgcttcctcatccaacatggatgcgccgcccatcagcaaccaccaaatcgatgagctcctcctcctcctcctgctcctgctgctgctcagctcggaatcgaaacgaatcagatcttgggctggggggtcttgacgaggcgcaacagatcggcggcttgcggggcggggcgggggcgggggcgggggcgtggcgacgagatcgaatcgaatcgagagcagaaggagaagaggaattttagggtttcctcccttcttcccttcctcctccgttggggttgcgggtgaggagagagacgagacgagacgacgcgagtcgggaggaggatgcgcactgactgcgattagccgttggatgcgcatcggacggtatgtgactgacttgtggggacagtgccaagagaaggctctggaagccaaagccccttccttcttccttccccccgctacaaatctcactcgcatcgcatcccatcccatcccatcgcaccgcgcaaaaccctaacccaaaggcaagggagaagaggagcggacgccatggatgcttctcgcgttggcgagctccgcactttcgtggaggcctgcaagaaggacccctccctcctcgccgaccccaacctcgccttcttccgcgactacctcgagagcctgggcgcccacctccccgccgccgccttcaccaaggccacccccaagcccaaggtctccgatctctcctcttttgcccccatttcttccatcatatcgtaacagtcatccctgcagcagccgtcctccatggatgacatcgacgatgaatacgacgacgacgacgacgacgatctcaacatgagggatgccactccggagccggacgagcttgaccaggacatcgtcgagtccgatcttgaacttgaaggagacattgtcgaatctgaccatcaggaccctccgcaaaaggtaatactaataatattacccttgcatctcccatctccagccccactaatcataccattgtttatgccagatgggagatccttctattgatgtcaccgaggaaaatcgtgatgcctcacaggaggccaaaagcaaggccatggaagcaatgtcagaaggtgctcttttttccccccacccctttggcctttttttttctttttctacttggcttgccttcaatctgattccccattacatgtggcattgcttgtcagggaaactggaagaagctattgaccatcttacaaaggcaatactgctcaatccactctcagctatcatgtatggtactagaggtaggtcgcctctcaatgctctataccatccatctttaccgtatatcatgcataagcactgaccaagttgtggaattcgtatgcttgtgcagcttctgtgtttatcaaaatgaagaaacctgttgctgccatccgtgatgcaaatgctgctctagaggtgaaaagctctgctcttctctatttttttttcttgctcaagtggaacttttgcatgtactatatgtgaagtcaatatgcagaattgctcttattacaaggttgattgatagtctgtgtttgctgaggcatggtacagcacagcctaggtgagctaggtggccacctaaggttaacacttagcagtgcggttatattattcattatgcttaccctagggttaacacttgacagtgcggttatattattaattattaggagtattgactatgccacctaggtgcgctttgcataacctgccattattatgtagattaacccagactctgcaaaaggctacaaaactcgtggaatggcttatgctatgcttggaaaatgggaggaagctgcccatgatcttcacacagcatcgaacatggattatgatgatgagatcaatgctgtgctcaagaaggtcgattttttatttggacgctctcttcctctgcatatgaataagctcatgtaatctaagtgacactgataatcttgcaggtggagcctaatgcacacaagataatggaacatcgcaggaaatatgaacggctgcgaaaagagagggaagaaaagagagctgagcgtgaccgattccatcgacgtgcagaagcacaggtgcttcctgtttagtttgatgcccatcagcccatgccatccaccttaacaaaattggtctgctttcaccaaaattttcctcttcaacctttggtttgatctcaaattttggttaggcaaccaccacatatggcactagttcgctttcagagcaaaagatggccaaaacttggccagtcaatttgattgccccaaatatgctatgccaatttttctcttggctctcatgttccctttttcaggtttagaccaaatgggcccaaatgatactgctcatgattatgttttgtttttctacaggctgcttatgacaaggccaagcggaaggagcaatcatcaagtcgctcatcgggaggtgcatctcccagggggggcttcccaggagggatgcctggtggaggtttcccaggaggaatgcctggtggaggtttcccaggtggtatgcctggtggaggtttcccaggtgggatgcctggtggcttccctgggggtgctatgcctggaggtgttcctgggaatgtcgatatgagtaaaattctgaatgtaagtgatttagaattagctaccctcattggttttcattccttgagatgacagtcactacacatgtatgtttttccctcttcaacaggaccctgatctgatggcagcatttggtgaccctgaggttatggcagctcttcaagatggtatgctttaacattggcatatttgtgatttacttgttcaagttccagtccctatgtagtactgtttctggataacatcaatcttttttattaaaaaacctgatggcaaagaagtactgaatggttgtccaattcccattgagtgggtgtttatatgtactttaacatttccttgtgtagtctgcaagggaagtggtcctaagaaatatgtggatataaatcaacggtaggtaaattggtttttttgtggcttatcaggagttatgaagggcgtgcattagtacatctgaagatattaaaggagcatagttcatatattttttgttttctcataaacagtattgccaccctaaattgaattctcaagtttcctgagtttgaaaattctgttcactagaggctattggattttctatgtttaatgttacccttattccttatgttgtatagatttcagcccatgacagcattgcaacacagaattttgcaatttgcgagtttggtttatccctctagtaaaaaataatgttgttttgtactttgcaaagccaactatatacaactttgtcttggtgtgtcttttgtataaatacggaaaaagttacacaagtgatattttgaaagcatttttatgacaacttggctatatatttttggagtaaatttcacaaaatccatgttttatggtcaaagttgcataacaccataggtattttgactggtggcttataacactaggtattatgattctaaaatttcacaaaacccctgtccctgtgcatgttaagtatgaatttacttaaaatttagcatagagtatggatttctttatttttgggttcttgactaaggctgtgtttggtgggaaggttgggcttccaacctagcatgctaaaccaagcgatggattaacgcacgattaattaagtattagctaataaaacttgaaaatggattaatatgatttttttaaagcaacttttctgtagaaaatttttgcaaaaaacacactgttttgcagtttgggaagtgtgcatgcaaaaaatgagagtgtagaagttgggaaagtagggggaagaacacagtctaaggttgatagtttaactcttcactgctttgaaagatattgtttcgaatatgctgaaattaatcaagatttgaataaatgtggggttttatgtaacattttagaccataaaaactgtggttatgagccacgagccataacacgcggtctttttttgtgcaattttgaccataaaacgtggggttttctaaaatttactctatttttatgtgcaagacttatgtttcaaacaataattatactcaagattaacttgtgtttactgcaaggttcccataaccacattttttggtgactggaggcagtattcctgttcaccagagtcactgcactgtacttatgttcaatggtatccgatattagtaagcaattataacagtttaggcattccaggcagtattgcgtagtcaaatatgttgagcatgttatccttgcatctgggtacctgcacaagccaaggaaaacatgcatgacacaaaaaaggcaccctagacattgttgagttatcaagtcatgaaggcattagaagtttagaaccacgctgctgttagttttatcaatacatacttgctaggttaaaagggaccgtagagctgtgttctgcacccaagcatacaatttcagttgtttaaccgtctgtttaatttttttttcagtgatgaacaatcctgccagctttgcgaggcaccaagccaaccccaaggtgggccccatcattgcaaagatgatggcgaaattcaatgggtcccagtaaacgttttgagtgagctgatggtatgagtaaattgttatttggcaatatggtgtcaagtgttttgtgatgagcaaaagcacgttggacggtctcttgttaggtgctactcttttttgtgaatgtggtattaaacggtggatgtatatgcagaaatacttttcatcgggctgctaactctatattacttcttttagaggtgcgacaatgaggatttggagatatgatttgttgacagttgtcgcattcattcatctatctgtttgtgcattgtgttgggtggatagctctacttgtgttgtgtttagggcttcggtttgtaggaaaacccaaggatttttttattagtactattcaacaaagaaaatttttctttccttagttgtattactatagaactgagggagtaataactagcccgatatgtacttatttttagactagtaaatatgcctgtacgttgcaacgggtgaatatcaaacaaatatggattgctaaagcgaaaaaataagggaaaaagaaataagggccaaaacaacgtgcgccggcccgacccgttaagcaaggaggtcctatagacacagtaaacgagcgagcgaaagtagacttattacaggagaggcccgatgcagtatgagggagcgaaagtagacttattacatgagagaccgcatgcaaagcaagtaataatagggcatgcagagcaagtaataataggtgtaaaaagagagggaaggtgggagttgaaccctggtggacggagtgaagattttccacattaaccaagcaggcaaataatcacttgtgttatgtgattacatggaagatacatatattatattaactgcggttttgcaatacaatgaaaacagaccgacccgactcggattaaaacagattttagtggcgcgtgtgggatgacggacgaagaaataccggaatccttacgtattttttattaggtatatatatatatatatagatatagatatagatatagatatagatatagatttagaggcaatgaactcgatgttttgggtttaaataatagagtaaattacatgttggactatattttttttaccatggtttcactttgggctacccttaatataatgttttcaccttaggccagattttataccaaaacctttcactttgggcgtatggcccatagtcagtctctcagagccaatctctcatccctatctgatcatctccaactgttttcatcgatggctgtagaccacaaagaccacgacgcctaagagagctcgagcatatataacagagctgacgcccgcgcatctcaagctcgtagtccagccagcacggggtcaacctccgccaacacggcgtcacgctagcttgacttttgttcccgtcgtgccggccggtctcaggctcaagctcaatgtctggtggcttgatctcgacttccgcccgcactcgcacgccattccttggcttgatttcaatctccgccgatgtcgtccgctggctcgacctcgacttccgcctgttcccgcacgcacgcattttccagtctcgatttcaatctccgttttcgtcatgccccgtcttgacctcgaactctcccatagtcccatgctggcgcgccacccccggccttgacctctgccgtgtctccccccgctcgacgtcgacctccaggcaccagcaggtagcagcacccacacgctgtccttgagctcgagctcctatccaccaccctagcttgacctacgcggctccgtcgccccagcgtgccgtcctcaagctcgagctcttctccgccgccgtcggccctcgctagcttgacttcgttcttcacctacgcccgcacgtcgtccccgagctagagctcctctctgccgtcgtcgcacctcgcttgacctcgatattcagtagcactagcacgtcgtacttgggctcaagctcctctctaccgtcccggctcaacctcgatctccacggctactccgatgcccgcgcgccatcccggagctcaacctcctctccaccgccgtcgcctccgtgactcgacttctgctgtacctggatgtacacgagctcctctttgctcacgtcgcctaacatcgacctccacacgagtctttccagtcccaagctccccatgttgcccccaaggctttagcgtgatctctgcccacaccgccatgagatggttgggtgaagttggaaagagatcgacggtgtggtaggagatgagtcagcgaactcgctggttccttcccaaccgagaagtttccttttttttccctcagccacactggcaagtgggccactggtccaaagtgatacattttggtaataaaatctggtgtaaagtgaaagcattcagttaatggtggtctaatgtgaaaccatagttaaaaaatatggaccaatatgcaatttactctaaataatatttcgcggcctgctatatgcctatatactgtcgttattgtattctttttattagacgaagagagtactccgacgttattaggaaatggccatattcatgtttcagacaagactcttgatttacatgctcgtcggttcggctgacttgtctcatcgctaaaagacattcgtttagtaaatatgcgtttgttttccctttggaacgtaaaagtgtgtggactatattaaccagggttttacccttttgagttcgaagtaaaaacggctcttcagcggtttaccaaaatctgatcaaaaactagtaaaaactaaagaatttcagtcaacacagcatgaaaaccagctaataccgatcggttttcacaacccgagacccggcctcgcgtggtaagtcgtgttctttccaaatttggctatacttttctatcttttatactccatccgtttcatattataagactttctaacctcgctcacattcatatacatacatctatatgaatataggcgatgctagaaagtcttataatatgaaacagagggagtaccctatatcggagccaaatttgggtattaatagaaacccgtgcttcagtgggatattttgttgagattggtagttgcatttggtaaagtgaagtggtatgaaaattattagaaaaatattaaatttgaatacatggaactttattgctatcgtgaaacaggtagtttattaaatattatatttatcaatttagaagagaggcagtgtgaatgtgtttctttgagttcaatgtcttgaaaaaaaattctcctatttgatattcaatgaatgaacaaaacaaaatcattctaaaaaaacaaaatattctcttgatgtttgatttttttttactacatacagttgaacatatgtaatcaaggaaagactgactgagattattggatcataccttgcagattactactacagattcttgcagtaaccaaatagctcgaagagagaacaattcattcttgtggaactgcatatacattattgaaagggagagataaatcatctctgattctcagccaataacctttacttgttgatataattctagatgtaacgaattattcttgcctcctacttagctacagaggttgtaaaaatatctcaccagcagatgaatatggaagcaaatggaactaaacctcgatgatgaatagtgcaccccatgcttacactaacttggaaactggtatacaccaaagattacttaggaaattagaggatcatatggattagacgacctctccgattatctcctcttgtcctagtgtagagactggtacgcaatcaacatctttcttcacatcaaaacccaaaatagatcagaaaaaaatattgtgtaggcatgtgtacgcccagcgttgccgtaatagctgcagaggcacggtacttgcagccacgctaccgtgatgaatcgatgctgaatttccgatgaaggctatggagcggcccaggttctttcatccacgccagactcttcagatgctatccattgttcaatgtatggccacctggcacggcccgaggcgatcaggccagcacggccgtgcctacccacgggctggacctcaggcccaggcacggccctacagcagtcgtgccgtgccggcctgatggcacgacgagcccaccgtgcccgggccagcccaggcacgcctaagacatttgccacttgttcacttcaattttgcacgtacagtttgaaaatacaaagtccatcacaaaaaccatgcacaaaatcagtgcatcacaagttaacatatcacaatatcacaaatcaaatacaaagtccatcacaaaaaccatgcacaaaatcagtgcatcacaagttaacagatcacaatatcacaaatctcacagaatacaaatcatagattacaaatcacagttcacaattcaagtcacaaacactttaaaaaataatagtagctgtgtagtgcaatggctgcctcattaaaaacctttctaggtaaaaactcacacctcgtgagaaaaccctagaaaggaaaaaagagtgcagcccacaactttcatctaattatcatattaaagtccaagtccagtacagtcatccagttcctcaaatgattttataagctctacattctccatggtatgctgcaacttcttgtctgcctgcacccagtccttgatcaatgccaaagcttacaccatgtcaggacctagacgccgtcgtcgctcctcaatgatcctgccagttaagctaaaagcagactccgacgatatagtagaaacaggaacagtcaagacatctctaactaatatggacagaataggatatttgtgtttgtgctcatgtcaccagtttaggatattgaagtcattgtcgaattggttgacagtgtcactatcaagataggcagacaactcagaggcattcaagttagcattaaaagaaacagcctgaatcaaagtagtagcaaaagttctcatggaaaatgaaccagcaccaagtccagaacctggactggcaccagcaccaagtccaagtgcatcactggcaccaaaaatctttccccaagctgtctttttattactagtagtactgcctggggttgttctatgtaatctcacagcaccaaacttactttcatacttagaaaaaatgtcagacaatgcagccctaacctcagttaaataagtagagtaatcagaggtcataatttgtgacataatttgtagaacattgctaaaacctctgatcttagccctaggatccaagataaaagcaaatgaatatagaaatggaatctcagactagtatgccaagaacttacttttcatgggaacaacaacatttctaaggtcaatatcattctcataagtgttaagatgtccagcaatctcaagaatgtgatgcataattaatggagatgttggataataaacaccagacaaaataacagttgaatcataaaattgttcaaggaataaaagcacaatttcagcaattgtcaagtgcaaatcagtaagcaattgtctaccattttccctaggataatgagttgcaataaacaatgaaaaaagctccttatgtgggaagagatgcttaagcattagataagttgcattccatctaacatccatgtccaaaccaaacttacgaggtcgaacacccttagcaatacaccagtttttgtataaaacaatgcgctgattagatgcattcacaaatgagatggctgttctaaaatcttgaagcatgggtttgaaaacttctagaccagccttaacaatcaagttgattatatgacatgcacagcgctgatgcaaatataaatcaccaacataagtagactgcttaggttttagaaaatccattgccttagtattagaagaggcattgtctagagtaatagaaaaaaccttatcagtcaaaccatattcttcaacaacagaaagcacacgttcagaaatattctcagcagtgtgcttcacatcaatcagcaccagacccaaaatccttttctctaattgctaatcagaattaacgaaatgagcaacaacacttaaataatcctccttagcattaccagaccatatatcagatgtcaaagcaacatagttaacatacttgaacctctaaataagcatagcacgaatcttgtcaaagtacttaaaaacatctctactaatagtttgcctagagacagcatggaatctagggttatgagcattctgaatgtactcctcaaaagcaggagattgaccaaaattaagtggcagatcctctacagcaatcaaattaaccaactcagttctagcataatcaggatcatattcccatggacgaacagtaccatcagcattgaacttaagcatagactgagacaaattattaacagttctaggtttgcatgacttaagatgcctaagtaaatgaccagtgccaccagatgaacgagcagacaaagttttttttttgcagtgattgcatttagtagaaacgcgaacctgcatgccattacatgattcaaagagttcttcgaagtcatcccataccttggatgatcttggccgcttgttggtagcattggagttggtgccggacgacgtgctagtgccaccatcaccgtcaccggtatcgtccacgtccggctccgtctctggctgcgacccatcgaaatgaggaggtgacgaagtgttgccgaacacatgcacgtgttcctcctccaagtcatcttcgtcatcaccccgcatccccatcaacctcaactcgtggttgcaagaggatggattgtccatcgtcggcactccggttcctcaacggcagctaccgctcagcgacctacaagacacaaaatgagagaagagagcagttagggactggagagaagtagaaaaccaagagaggagagaggagcagagataggtgtgtacgctgtacctgcgcatccagagcaccggagttgccgttgatgatagagatcggcagatctatgagaagaagagagcagagactgggtttggggagtgatctgacaaagagctcacggagaaacggcgagcaggcgagagtggcaaaaaaaatgaaaaagaaagaggaaatcgagagcatggccgacgatccgaagaccggagaggcagagacgagacaaggtcacggatccggcgaggcggcgaccctcggtggtagatccggcgaggcgttcatcggagacggcaacggaggatggagagatggaggcatggtcgcgtggaggtggaggcgcggatcgacggaggcggaagtggaggcggagcggtcaaggtggaggcggagatggaggcgtgcgtggatcggcggaggcgagaagaagcggaggcggctagggttagggttaaggttgtggcgttggagggaggcggactgacggaggcgagaggacgcagcggcctttatatatgcggcgcggcggcggctcccgatgggcctcgtcgggccgtgcctaccgttatacaggcctgggccgtgccggccccgtcgtgccatgccggcccagcgtgctgctgagggagcccaggcacagcccggctgtcgggccgggccggcacgggcacgaacattgacgggtcgggccgtgcttgggccgggccaaacgcccgtgccttgggccgggccgtcgggctgcgggccatatggccatctataggcacactctctagtggtagccggatcggtgcaagcagcgaacagaggcagcactcacgaaggctgatcgggtcattcgaacaaagatatatatatagttgtatgtttgtgtaagaaaatatgctatgatatttcaatgagaggagaacactatcgttcacagttacagggataattacagaagcaaataaagtctttggcactagaattccaagttacctgcccccatcaacttgcagacaaggagatagatagtgttgaaatatagataagtttagttatcatgtttctgttgttatctctttatccttatctcttgtaaccatatgttgttatccctttgtaatcgccatggtagaggctgtttctaccctatttaacacgtaccgcgacccagcgtgagggaatcacgttctgtcggtgacatgggaccgggagtatcatgacttagagacttgaggcagacacgatcacccacgtggcctaaccccctcgggggggggggggtcgggcccgagggtgatacggccgcccttctctttgtctccccgaggggtcggaccgctcccatctcggccccgagggccgaggcgccccgaccccttgtgggttttgcgccgcgtatatggggtaggtgagcatagcggggctcacctaaccacatttattgcggtttggacgagcgcgtcacgccgcatgaaacgtagtgcagcgcactcgtttatccggtctgtgaccagtcacagaccgatcagatcgtgggttaggtggcgacaggcggtctgacgcacgcctcgccccatcccatcaggatgagagcctccaagcactcgtccctagccggagccggcgtgttagctcctggagatggcacgttggtcccggtcagatatataccaggcttcatcctaaccattacaagcaagacattgtatgaagaggggcgaacatgcagattgttaaactgacacgtggtggacaagaatgaccgatttgtgaccggtctgacaatggtcatgtcgtcagcagacagccatgttcccacgtcgcgcctgcctccggcagaagtggaggtaggtatgggccgtcccatcagaaggtcattcggacggcagccatacaaatctccgtccattaatgaagagaagtcaagttggagggaagagaggatgagtccccacacaaaagaaagagagggagagatggtgcatgtggtatccccttgagatataaaaggaggaccttgcccacttagagaggaaaaaaaaagaacgatcccagaacgatcgggggctggctcgcactttgtagcttctttatacacagatccaccaaaacacaggagtagggtattacgcttctcagcggcccgaacctgtatacatcgcccgtgtcttgtgctttttccattctcgcgaactttccacagaccaggagcttagaatctcacccagggcccccggccgaaccggcaaaggggggcctgcgcggtctcccggtgaggagccccacgctccgtcacgttccatctagttttcctatatggtatcagagccctctccctccagatcaatctagctcatctcgccatggcgacgtcgtccttggcggctccctctctctatggtcaggaggtgactgagaagctgaccaaggccaaccatgttctttggaaggcgcaagttctcgccaccctgcgaggagcgcagatggcggggttcctggatcgctcgatccaaccaccaccaacaataatcatccttgccacgaaggacaaggacgggaaggagaccaccaagaaggtggcaaatccggcgcttctccaatggcaggcgcaagaacagcaagttctcagctacttgctgacgtctctgtcaagggacatcctcgctcaggtggcaaccttcaccaacgcagcagacgtttgggatgccatcgaggagatcttcaactcgcagtcccgtgcgcgtatcatcaacacgcgcatggctctatcatctactgtgaaaaggtaaccgtagtattgccgagtatgttggaaagataaaagggcttgcagacgagatggcatctgctggaaaagcccttgatgatgatgatctgatctcccatatccttgctggtttggattttgattataatcctgttgtgtcctcgattacgggatgcaccgagtctgtttcctttggtgaagtctatgcgcagctgctgagtttcgagcagtgtcttgatctccttcaaggaggctctcagtcctccgctaatgctgtgtcgcgaggagggcgcggcggcggcggcagaggcggcggacgcaatggaaatgccaaccgtggtggtcgcggcggtggcagaggtgacggtggctccttcaacaacaacaatcgtccgacatgccaactctgtggcaagatcggccacaccgtgcacaaggtgctggaagaggtttgatgcctctttcactggggaagacaagagtgccaatgtcacagcctcgtcctacggggttgacacaaactggtacatcgactcaggcaccaccgaccacattaccagtgaacttgacaagctgacggtgaaggacaaatatgccgcaacgatcaagtgcacacggcaagcggctcaggtatggacattaaccatgttggtcgcaccattattcacacttccactcacaagctttattttaataatgttcttcatgttcctgatacaaagaaaaatctaatttctgcctatcgcttgatgcttgacaaccatgccttcattgaacttcatccttccttctttttgatcaaggatcaggcaacgaagatgctgctgttccgcggcaaatgtagagccggcctatgcccacttccatcatctacgtttcacaataaacaagctcagcaagtccttggcgctttcaaggtttccccgacgttgtggcatagtcggcttggccacccgtcgtcagctatcgttgatcgagtccttagctcaaataaattacccgtgtcttctgagagtactcagaatcaagtttgtaatgcttgtcagtagggtaaaagtcatcaattaccttttcctaagtctgttagtgtgtctaaagctcctttagagctagttttttcggatgtttggggaccagctccctcctctgtgggcaataagaactattatgtaagtttcattgatgattttagtaagtttatatgggtctatttgctcaaacacaagtctgaagttttctccaaatttcgtgaatttcagacccttgttgaacgttcatttaatactaaaatcaaagctatgcaaaccgattggggtggtgaatatcaaagaatcaatagcttcttttctcatattggcatagcacatcttgtctcttgcccacacacacaccaacagaacggctcagctgaacggaaacaccggcatatcgttgaaataggcctagctctcctatcccatgcctcaatgcccctcaagttttgggatgaagcctttgttacagctgcctatctcattaaccgggttcctagccgggtaatcaactttgagacacctttagaatgtctctttggcatcaaacctgattactctgcccttcgcacctttggttgcgcttgctggctgcatctttgtccttatcaagctcataagctatcctttcgatctaaatagtgtgttttccttggatatagcctccttcataaagggtttaaattaaatgcttggatgttgcttccggttgggtttatatctctcgcgatgttgtgttcgatgaaactgtgtatccattcgctactcttcatccgaatgatggcgctaggcttcgtactgaactcctccttcttcccgatagtttctctcctaccactcaatctgatcatgggggtgaaatagtgcaccaaccgctggttaattgttctcctaatttttctgatcaaattggtgagaattcttcaagaacaggagttgctcagattggtggttcagctactggaagcagcgaagcagaaaccaggtcgccgggtagcgccagcagagaagaaagcgtttcaccggaggaaacgcatgattttatgcatggtcctgtgcagtctcaattttctattggtgcagctggcgcaggaaatgatgatggttcaccagtgctacgtgacgtgtcagcagagctgcagtcagacagtgatgctgcaccaatctcttcatcacctagtactagtgcaccgagtggtggagtagtgcatggcacacatgctgaccaagtcacgtcgccatcatcagcagcgtcagtgcagtctgaacaggagcagcagacaacacaggcaagtgatcagacgagaccagtcatgagactacagaaaggtatttctaaacccaagaggtatacagatgggactgttaggtatggatgtcttactactactggtgagccagaaaatctccgagaggctatggcaaatagtaattggaggcttgccatggaacaagaatactctgctcttatgagtaataaaacttggcatctagttccaccaacccaaggtaaaaatataatagattgcaagtgggtgtataagattaaaagaaaagctgatgggtcaatagacaggtataatgttagattagttgcaaaagggttcaagcagaggtatggtattgattatgaggacacttttagtccagttgttaaagctgcaacggttcgcctaattctgtctattgcagtctcaaaaggttggagtttgagacaacttgatgttcaaaatgcctttctgcatggatatttagaagatgaagtatatatgagacaactctcaggttttgagaacaaaggccagcctaattatttgtgtaagttagacaaagccttgtatggcttgaaacaggcaccaagggcatggtactctcacttaagtacgaaattgcaagaacttggatttatttcttcaaaggctgacacctccttgttcttttataacaagggtggttgcactatatttattcttgtgtatgttgatgatatcattgttgccagttcttcttcagaagttgttgcagccttacttaaggacttggagaaggattttgcattgaaagatcttggagatctacactactttcttggaattgaggtcaagaaagtgagtcagggacttgtgctatcacaagccaggtacgcttctgatattctcaagagagctggaatgtctatttgcaaaccagctagtacacctttatctactactgaaaaattgtctattgaagatggagatttcttaggacaaaatgatgctagtcattatagaagcattgtaggggctttgcagtatctcactctgactagaccagatttatcattctcagtaaacaaggtctgtcaatttctacatagtcctactacagtgcattggttagcagtaaaacgaattttaaggtatataaaagggactgtggaatttggacttagatttggtaagtctgattctatgcttattagtgctttttctgatgctgactgggctggttgttctgctgatagaagatctacaggatgttttgcagttttcttgggtcctaacttaatttcttggagtgctagaaaacaggctacggtttctagatctagtactgaagcagagtataaggccttagctaatgctacggcagaagttatgtgggtaaggaaaattttggatgaattgagaattgcaagaccttcggtagcacaattgtggtgtgataatttgggagctacttatttatcagctaatccagtctttcatgcaaggacaaagcacattgagattgattatcattttgtgagagagcaagttgcgaagaagctacttgatatacgatttatatctacaatagatcagctagctgatggtttcattaaatccctgccggcgccgagtttagcacagtttagacacaatctcaacttgggctaagttgtgattgaggtggggtgttgaaatatagataagtttagttatcccgtttgtgttgttatctctttattcttatctcttgtaacaatatgttgttatccctttgtaatcgccacggtagaggctgtttctaccctatttaacacgtaccgcgacccagcgtgagggaatcgtgttccatctagttttcctatagataggactacctgtgctccttttgccaaaactttctgagcccaccatagagtttgggagaacttttcagcaacccctgagataaagttggcaatgaagattcacaagttgaccatcatcttctactagtatatgtatatttatacaataccagcttaatttggacagaaagtgaagaccaaatttccagtttttttgcaaccattaatccacccctttccgtggatgcagccagcataaattttctagacttaccgtggatatgatgctttggaattttggtttatgtactgctactagctagctagctagttcatctcatcctaacagtaattgacgtactagcacaacagtgcgtgcagctgattcatataaaagaaataaagaaaaagaaaaatcgatgtgcagtttgatcacttagctagatgatctcctgcatgcgatggtggacgatatgcatgttggcggcttgcctctttttttgttgttgttgttgtgtttgttcatgatgatcgatcagtggctgtctgcgtcacagtcactactgatgctccctccatttgacaaccaatgcaaagaatccagaagcatgatcgatcagctgttactgctttatgaaaaaggaagaggggatcgatcgctttcttgctttcatttttttccttcctttctttctttctttctgttagttccattcaagtatgaatgattgcttcgttcaagatgttttattacccgtgtctcttgagagtgttagtggctctagctaattaattcccactactgagtgctaataactcccgctaaagctaagctaagctaagctagctgcatctttgtgcatatactgtctgcgtctcctattgttggcaacgtcgtaattaactttagcatcttatgatggtgcctgtctgcctgctcgaaatcgaaacggatggatggcaaattggcaatatggcatggctaagcaagctagcttgatgcagcagcaagaaagcaataattacttatttaaggtggttggatatcctcctatattcttatcgtgcttggatctgctctcagaatatccaacctagctagcctgcaagcaagagagtgtagctactcgatccgatccaatgtctctcatcacggatgagtctcctagggattgctcctcctacaagcatcagcatcatcatcgcgccatccatggtcgccgaattagccgccgcactctggtggtggcgtcctcagcggtggtgtctctggcatcgctgtcgctcatcctgtggctcgtcctccgcccatcccccccgcgcttctcgctgctcgccgccaccaccaccgccaacgactctgcctctgtcgtcgccatcaacgccgccttcgccgcccgcaaccccaactcccacaccgccgttctctacgaccgcctccaggctagcgcctcctacgccgggctccctctcaccgccccctcgccgctgatcccgcccttcttgccgcagcagggccagggcgacgccatgctctccgcgtcgctcacgtcgccaccggcagcggctgctgtggcgggagggcgggcgctgctgaggctgcgcgtggaggggcagctccgctggaaggtggcggcgtgggtcaccggacgccacgcgctcaccgtcgactgcatcgccgttgtggagctgcagccgacgccgacgccgtcgccgagcgcgatcgtcggcgtcctccagccccaagatcaggccggctcccgctgctccaccaccgtcgcctaataatataatatccatcaaaaccaacaccacaaaccatgcaaactgatcgatggatgcatggaggaacagtcctagttcttgtacatgtacatgtattctctctcgcgttatgtatgtatattgtcctgtaccgcgcgcggtaaacaagtaataaatcaaagcaatctgaatcgtacaacgtatttcatgtgttgctttgatttttttggctttcagctgtggtgctctgtgtcccaaaagtaggagtgccgtacttgcattttggttttaatttcttttgttcaccacaggtctggtctggtcactctcactcactctaattaaatcgattttttattattactccagttcattcggtgtgtgaatgtgaatctgcctgtgttgtgtatgcgactatgtgcttatgaaatttcctggagtacacttaagggcggccgattttcgtcgtcataaggaacggcgcaaaggaaatttcggcccatacatatggcccatccataggccatctcagtgtctaggccagtccagtccagtccagtccaggacggtccagtccggtcccgtagagcgccggcgcgtgtagcttcctcctccgctccaggctccagcgagggagggagggagaccaccgtctccgccggctttgagagagaaagagaaagagagagagagagagcggcgagatgcggaagcgggatctgggcatcctcctcctcgccgccttcgccgtcttcttctcgctccaggtcagtcctagcttcttccttccttggtaccaaaccctaaccctaaccctaacccgcttgaattgatccatggccacagcacgacggcgacctctccttccgcgaggcctggtaccacctctccgatgccgactaccccatcaagcacgacgccgaccgcctcccctctcccctagtcgccgacctcaacggcgacggcaaacccgaggtcctcatccccacccacgacgccaagatccaggtcctccagccccaccccaggccctcccccgacgatgcctccttccacgacgcccgcctcatggctgatgtctccctcctcccctccaacgttcgcctctcctccgggaggcgccccgtcgccatggccgttggcaccgtcgaccgccactacgcccacgccccctccccctccaagcagctcctcgtcgtcgtcacctccggatggtccgtcatgtgcttcgaccacaacctcaaaaagctctgggaggctaatctccaggacgatttcccccacgccgcccaccatcgcgaggttgccatttccattaccaactacactctcaagcatggggatgcaggtttggtcatcgtcggaggaaggatggaaatgcaacatcatgtaattatgcttacttttcctctttataccactgctgctcatctacatgttgtaaaacacacatcatacttctttttttacatgtgcccaaatgattcgaaaataataaccatattactagtttgtaattcaagttgcattccagaataactcagggccaccagcatagaaccatccctcgtttgtaattcaggcaaggctacgcaaaaatcgttttcctcctttgcagtaggatttattcttttatagaatttgctgttatgtgtggatgcctttattttttttgctacatttctacaaaattaattttagatacttcaaagttctaattctatcatataatgcttgaccatcttgttgaatccttactgataataacatcttattttcaaactttctcttttggcttgaatatgttaacttacggtagttacttgtttgtcagtcagcagagcttttcgatgaatttatggtgtcagaacacaacagggaagagcaccgtagaagcgccagtgagaagcaggttatcttgtatttgtaagcttatcagttagtttatattctctgtgccccatgaaaaaataaaactgtgggcaatattttatatcgagaaaacaacaaccagagtacgttgttgtatccttgctccttcacctgatgaaggcctaacctgcgctggtattgcgctttgatgtcatgcaggcttctgagacaggcaacacagacctgcgtcattttgccctttatgcttttgctggccgcactggtgaattaagatggagccgaaagaatgaggtgcacccatcctgtagtccatgacttttactttatagtttatactactatttatttcaaggatgttgccacttctgtgcattttgtgtcatgcattagcatgcacaggacatgaatagcttggaaagcttgccatacattattcatgtgtttctgttttgacaaaacagaatatcccatcgcaaccatccgatgcttcagtgctgataccacaacacaattacaagcttgatgcccatgcccttaatagtcgtcatcctggtcaggtgagaattgtgcctagcactcttgataatggtatatttgccaacagaagtcacagttacatacttaaatctgagcaagtgttatgtttctgttgatatttgttctttgttagcttggtttaattatcatgatgtcgatcatcttcagccagtataggtggctgtcttgactctttagcatattcagcattcccacttatgtacaccagaatgatttgcgtgtgttctacaggaatgtactttcaaatccatttgttctttgttagcatctttagccacgtttccttcaattccttactcattctctgcatgttgctgctgctaatatttctgattgatgaaccaatagcctgaacatctttgaacaaaatttagtggattggtaaatatcaaattctgctgccatgttgcttttgatttggatttcaatgtcaaatgtgctgttattttaccacaagatgctacacagttggttcttgtagtaaatatgatctcattacaagctaacatggcatatatggtttcagttcgaatgtcgggaatttagagaatcagttcttggggtcatgcctcatcattgggtaagaatagatattagataactactatatcatatttctctaatttaattttttgggatgatcaactcagattgatttttttttccttttcaggataggagagaggatacttttctgcaacttgcccattttaggaggcataaaaggaaagcactgaagaaaacacctggaaaagctgttgtaaataacgtgcacaagcccagtgaacataatccacctggaaaggatgtttccaataggttagcaaatgtgattgggaaagctgcagatatggctaattcaaataaaatcaagaaggtataatgcatgcagacacaaacacatagttcttacgcactagcatgttgactgtgttgttctttttgtgtttggtgttttggggaggggggaggggggagggggagttgcatgaacgcagtagtggtaacgtgcatgggccaacgtaggcaccaggagcaggagcactcgtgattgcacggcgcacagagctactcaagatggagaggatggtggcgtggggaggggagaggataggatttgaaatgaggcagatcagtggaggcagtggtgctggcagttactgggccaagatgacattgtaggtggtcgggtagaaggaaaaagagaagatggcaggggcagtcgagggttcttaagagtggatttggtgttcacccagtaggaaatgggtgaagatttgcccagtagggcctcccttactctcatttcaaaatgtatcctctcaatttatctgcaagtgtgttcgtcttgaagatactgtatactttccgatccatttactgtactctcaaaattagtgttaaattgtatccctggaactatattctaaataagtaagaacagtcaaactttgaaccaaacatacttacctaacaagttcatgtctcgtcctcagctctacttatctgcatgattatgagactatgggcacgtcctaactggttgattgtatagattacggatagaaaaaaatgctcatttttggaagtagcttagaaaaagttacctaagcaatgctgatgtagaaagttttgggagaaatcatactttgctggaagcctggtatgaataatccatacctcacattagctgtttaggacgcacactatatatactcatgagaacagatgcattatttttctatagaaatcaacgaataacacacgtgtccatgtatttgcactcaaaatatcgtgagtgggagtgggtggagaatatgccatcgcccccaattccctattttgaagtgtataagatataagataagattagattggtgattggatttactttcatcaatgatctgtgatctctagtacttaagtagtgtctctagctttttttgattggtacgtctttcctggttcattttttgattagtgtatgtctttcctggttcagtggtgtgaggtaggtaggtgatgttaatagcttgatgttggatgtactttgtttatggcattccatgttagtgtacttcatgcctatgtgagtttggcccttactattaaaatcgttgcctctgattagtgatctaatgcataacaatctaaagactcactcggtaattcattaagatacatctgatatcttttatgtgcatagtgcagtcctccttcaattattggcattcatcacttattcaggcgattcttacataaattgcatgttgtttctttgctgcatcataattctttttcccccaatacaatcacagtggtctcacaccaaaattttatttacatatatcgtgttactttatcatgaaatgtaacatctttcctctactgcagtcacaaaggacgctttatgttccgacaatcaccaactatactcaagtttggtgggttcctaatgttgttgttgcccacgaaaaagaagggatagaggctgttcatctagcttctggacgtacaatctgcaaggttgcaagatatatctcagtgatatttgtgttttcacgtccctgccaaagcttgtctaattagttcattgtaaattatttatttgtttatagaattttcattgcctggtccactggctgacatcaagctacaaatagtgttgaatactacctgaatggtcactaaaatcaatctatgtttgcacttgcatatgtacacattatgcatatattttttagcaatcattttccttctaaggaaatcataattcacgtgtgcgcataatttacatgtctgtaatcccatcatacaacttttctgtctttgttttctgatttttttttccatttccagcttcatttaacagaaggaggccttcatgcagatattaatggagatggggttctagaccatgttcaggtgtgttgagcgttgagattagagagcaatttacacttttcatttccatttttttagaatacaagtcttcatgccactatattttgtctgcaacttcaaggagaactgtggaagtgtggattagtccattaagcgagttagctgcttgagtcatgaggtgttatggtgtactttacatcttataaagtcaatgaaaaaaataaggggcaattgcaaatttaccactgctttgaatcgttattgcaaggctaccactagaaaattgcaaaaatgccactagaactgtcattcaagtggcatccttacaaaattgaaaaaactggtggcaaatttgcaaatgccccaaaaaataaatgtttcaggattttcacttagttcaattaatcaatatgacctttagtgacactgaaatgttctttttttctctcactagttttgctatcttttcacactagtatatactttttaataaagtgttagttatgttatatgtatgccttttctcataaatgactgcaaaaaaaaaggtatgcaatgtccaaacaaaaatgtgaacaagaacacccccttgtcactttgcaataaataatctattttcatgtttaccacaggatgtgtactgaattagatatacaggtacacaagtccataatcatatttctttgctttcaatgtgcattcaaatttattgtagttgttttctttagtagcttcacttgtgccctacttgttattgttatcttccagtgtaaaactgagtgataatgtcttctgtaggttgttggtgcaaatggcatcgagcaaacagttgttagtggttcaatggaagtgctgaaaccttgttgggcagtagctacatctggtgtgccagtgcgggagcaactttttaatgtttctatctgccattacaacaatttcaatttgtttcatcatggtgacttttcaagaagttttgggaggacatttgatacaactggcttagaggtggcgactcctattctgctccagagagatgatggtcataaacacaggagaggaagccacggggatatcatctttcttacgagtcgtggggaggtcagcacatcactgtttttccttggaaattcctatcattaatgataattatacattgttgtccttgttccacatgtgcatttcttttcaactttccatacctccctcttgtaatctgcaatacactgactttctttattatcgtaggtgacctcgtactctccaggtctacttggtcatgatgcaatatggagatggcaactgtcaacaggtgcaacatggtccaaccttccgtctccatcagggatgatggaaaacattgtagttccaactttgaaggctttctctctgcgagcctatgacccaaaacaggtaatcatcgcgggtggtgatctggaggctgtggtgatttctccttctggtggtttattggcatccattgaactccctgcacctccaacccatgcgctggtacttgaagatttcaatggtgatggtttaactgatattattctggtaacatcggggggagtctatgggtttgtgcagacaagacatcctggggctcttttcttcagcacgcttgtgggttgcttgatagttgttatcggagtgatatttgtttcactgcacctcaactcctcgaacagcggtaaacctagggcttcaaccgactataggtgacgacattatgtcagtcgacagaattccttgtcaatattgaggtgttgttatagcatttgatttagatttttcatataatcaactgccaactgggttatgtaaacttgtgcggcgaatgcatttttggcgtaacatgttgtatgatttgggatgtatttctggcttagctcatatttaaagaggaataggcacttgccaccatgacatatcgtgctctgatccctaggacaataaccagtgatttttcgtgtggttttggatactatgtttggtggttatattattagtgtggttgtagttatcctgaaaccaagtagcagatggaacgaattaagatttttctaatggaagctatgagctttttattcattaattcttcccatcactcgtgtgctggatacacgtgagaacgctaaccatgaaaaaagaagggttaatttgatccatgaaggttccatttgctgcgttcatcaattccgttttgtgactatgttgatgctggctccatcaacatgaatgaatcatggctatggcaagtcagctacataatacgtactacgaagtactccctccattccaaaatacaatgcataaccacccataatccaaagaccaagaaataattatcatcttgtagtttggatcatcctaataaatacaatgcatatatccaatagaattagagaagaattagagaacatgagagtggatgatttaaaaaggtaataatttaatggagaaaggggtcatagttaattgcctacatgcatacatgccttatactattatggaacatctaaaaaaaagtggttgtgccttatattatgtaattatattatgtaatggagggagtagctatgtatccagtgccaataaaagcataataaggtaaaaaaaaattccagcacatgcctgttcaagaggaccatgatcgactggaacaagaatagcttttgcaaattgggctcatgctgatgaactagtctcagggaatatcaaactaacaaatttaatacctcatagtataatcacacgaaaccaaagatatatgagcaacagcatgaaggaacaaaaatattcactgggttactatggaatctgctcacagccataaaattaatcacagtgaattgttcggagacactgaagttcataatgaactgaaactcgaccaaatttctaaatcatcaattctaaccaaagtaaacataattaaaatggaaaagccgttctagaattgttggttacaagtcgtaactccaaagatcatgcgtgattcgaatgcatcaaggtttgatatttttcaacggaaagttagctgaaatctcaggagagtgaactccaagataaagctggcacagatagcatgaatgtcaggcagcttggaaacaccatccataatcaactgatagacgagaagggataatcacttggtacattccaaccacataactgagtttattttgagttgtcacagagaagaatgaacatagtcagctagtcatagctgctattttagtaattttgatatcgaagttgaggaacttattctgtaataacaataataatagcatacatagtacaaaaaaaatgagacaaatcattagcgctatcagttatcaaggaacatgctactttacaatttccaataattactgaaccgaatgcaaactgtgtagctggtgttgtcaaacatggtaactcgaacattgtcatcaacggtgaaatatagagggacagggactcacagttgacgatgacgacgacgatgatataaacatgtccagcggcttttagcaacttagtaaagggtgattgacagatccaggcgcatgagaagtgaggctgtgtgaaccatgtacagggttgggacatactgaaacgtatgtcctccagcaagtaggcagagctcgatgggtgtagaatatatggagtaagacgtactatagttgttgtctttggttagcaaagaagtcgaagaggttgaggcgcctcccttggatcttgtttgcaatgctcagcctggtgctggtgctgctgtttcttgtgagaggagtgagatggaatcggagcgtgcctgtatcgaggctcctaatctgaggcgaggagcagtgaacactgcgactgcggccgaggcggtagagtctcttgaacaaagaggactgacgtggggcagcagcagcagcatggatagaagaagaatccccccccaaggatatctcggagtccattccggcagaagagacggaggcggctttggttgggacggcggggcgagagcgggcgtgcctccaagactcggatagggatctcctgagcatctgggcaggcctggtgacgaagcccctggccctgatgatggggttggaattgggcgggggggcatcggctgagccgtcccatgactggcgggagtcggcagtggcgtcgcagcagacgatccactcgcaggattgacggagggagcgcttgcgctgcagctggcgaccttgctcgtcttcctggtccacccggacttgctgcccttggtcttcctggtcgtcgtcgagctggaagaggtagaggagcgtagtccgaaccctgggctgagggatttcggtggagatctctgcggctgcggctactggggacggggaggggaagcagcgcgcaggcgcagtggagagcctctcgagcaggcaggcggagcagaatcccgtgaaggggggctgcgacgggtgcttcgggcaccggctcgacggcacatcgccattgtgattcatcgactccaagccgtaggcgtaggtagggtgggggatctgcggtgaggtttgactagggttttgaccaacttctcttgatttggggaagactagaggaagaggaggaggaagacgaccccaccccaccccacccagagagccgttgcctgccttcgtgggtctctttgtcttttctgcctttgattgagtactcctacaagacaccgccacctggaccccacctctctttttctttctccctcccatttttttaaggaaaaattacgaattaccccccgaagtatcgtggtcatccaaattacacccctgaatcataaaaccggacattcttcacccccaactatgtaaaccggatgaattatccccctcaacccaatccgcggtggttttgatctacgtggcagtgcagtcagcaattttttttattaaaaaataggtaggccccacctatcagtttctctctctcttctatctctctctctcctccttcagacggcgacagcggaggcagcaagcgcggcgaggcgagcggcaggggcggaggaggaggcagggcggcgcaggggcaggcacgagcggcggctgggtgctgagcggtggcggcgggggcggaggaggcgaggcggtagcggctgggtgcccacgaccttttgtgcccacatcccccttcgcgtccccgccgcctccgaaggtttcctcaccggcgccgactacgccatcgccgtcgcggacttcgccattcccaaggtctccgtccccgtcaggctggtgctccaattggaggatcttgtgcatgtagtgccatgccgtgcgctggaggagctcgctgccacggccgctggcggcatgctgcaacacccggaagcacgtgttgacaacgttgcagacgacgtggtcgtaagacaggagcggagcagcggtggaggaggatggcctcctcggcacccgggtgggaaaggggagagaagccgccgccgctcgcacccgtccctgcgccgccctgcctcgccgccactggtgcctgcccctgcgccaccctgcctcctccttcgccgctgcctcgcctcctccgcccccaccactcacctcgccgccgcgctcgcctctccgccgccgcctcgcctcctctgcccccgccgctcgcctatccaccgcgctcgcctctccgctgccgcgccgcactagcctcctcctccgccgccgccgcctcgcctcgccacgctcactacctccgctgtcgccgtctaaaggaggagagagagagagatagaagagatagaagagagagagaaactgacaggtggggcccacctattttttaataaataaattgctgattggactgccacgtagaccaaaaccaccgcggattaggttgagaggggtaattcgtccggtttgcatggttgggggtaaagaatgtccggttttgtggttcagggatgtaattcgaatgaccgctatacttcagacaggtaattcgtactttttcttttttataataaaactcagcttcaagcccgaaaatactaaggagccccacgttcggttgaaaaaacaacttactagtattagccgcgcacaaaacaaaaaaataatatgattatcgtataattaattaacgcaaaatctaacagagttaactagtgacgtgttggtgggccgtcacaaatcgtgtgattattacacatatggatatggacacaggtaaagataaagcctgcaaccggataagtacagacgtggagatactacaggaaacaaacctacggaatacaatatattgttttcttttttttgcggtaatcgttatgttatttttgtttcatataagaagtaattcttcacgatattagaagtaactaaactgttttagggaaatacctatgaaaaaatagaagtaactcttaacggtgtaagagacgactagactactagaaaagtaactcataaaaatatatagaagtaatttcttcatgatattagaagtaactactttgctacatgtaaataactctttacggtatattaaaagtatattgttatagggaagtaactatattgctatagaaaaataattcttcacggtatttgaaataactatgttgttacataagttaagaacaaaaatagaaattcaaaataattttgaatatattaaatatttgacttgttttgtcacatatttcgagtaaagtacgatggttcaaatggatctttaaaataatatatggttttaaaaaaataagtggttttataaaaagaatactaattagtttcttgtattataatgcaatggtgcatgaatgccttctattagaatttggaaggatgtacgtaggagagagagggggggtacatacactaccagaaaccggattaggcctgacggccaattattttactgacgtgtacaatggtttctatcgcgaaaaaactaattttcctgacgagcatataccaacatcagaaaaatagaattttcttgacctcgattgagtgcgagactccaaaattagtactaagtttcttacctagtcttttggccatgcaaactccacaaattaatacttttgtgttatgttcaaatagtgaactggaactacattatactgttacgagggatctatgtgtagcacttgatccataagttaatgaaatattgaacttgaactggaggtgtctatgtgatccatgatgaatactggaaatgagtatttttgctaatgtggtgtgtatatttgattcatgcctacgttctggtaggttttctcctaatgatttgtggctagttgtctaattgtcagggaaatatattttcctgacggtcataaccatcagaaaaaaaccacagcaaaactgtgataggggagaccatcagcgatagatgaatatcactgactgctcacatcaacatcgggaaaactatccctgacctgagtacacgtcaggaaaattaatcctgacgcgcctccgtcacccaaatttatttttctctgacaagctagtcctgacggaattttcctgacgttgacacgtcacaaacaattttcctaacgtgtttttgttttatcctgacggtttttagccgtcataagtaatctagtttctggtagtgacgatcctatttttggtaaataacatgggttttgcttagtactaataagtgtatttgcacatttctttttttaagcaagacacactcacttgagggaaggaccacacctgttttttttttttgaaaagaagtgtatagctggttagcgctattgcgctagcacgcgttgttagtgtccattaattaagcactaattattaatttttttaaataaatttatttggttttttaaagcaactttctttagaaaacaaaatattgcggtagctagtggttaatgttgttatttaggttgcgaactcgttgtgtttaggtttttaattttttttcataattaatgtactcccaatcacaaataattaagtaatgtttgaagatatatacatgcaatcaatatatatattgaaacactaacaatcgatttctcttttaaatatttcgattcacttttgtaagtgaatgtttagatttgtcttaaaaacaagtttcattatattacaactttgttatatttttattggttttttgtgagtaattaatagtcaatctaatgtattagtgtcgaccgtacgtgttgcttatgtggccttattcaaatatctaatttaatgcaaggcaaaaccgccgtgactttcaaaaatagttcattgccctaccgatgataatataggttgatatgtatgtatggttgatgctattacacatgcatgtcagatatatctgcagagatagatagatggatatggagttaattgaactcatgagagaacaaaacccaacatgtatattttgcattgctcactccatgattttttcttttaaaacaatgcaggggatgaaaacccctccatctcaaaatataagcatttttaggtcttaatatggtcttcgaaatactactttgactaacaatatctataaatgtaggatattttaaataaaaagagttacatattatgatagttcgtttaatgatagatatagtgacatcaaatttacatgattaatatttttaaaatttttactattaatagttaaaatttagatagtttgacttgctactattctaaaaatgattatattttaggacggagggaatagcttataattatacaagagaacaaactacaaagattaatgaatgtttatggtaataattaattaattagccccttcctccgatccataactaattaaggggcgggggataaattgttggatcgcgcgctccatgaattggaggccaaatagacaagatacatatacaaacacattggttgcaaacagaaaaacacaggtgactagttggctagcgtcgttggttttaattgccagtgttccagcacaatcggttcgtatttgcgctgctcctatacggatctcacagagaatcaagtggcttaaaaatcgattgtaaccagggcaaatatatgtcgacataaatttagcaaaaccgaacaccgtttgatacacaacacatgcatacatgcatgtaccgtaccgatggatgtgggtgcggtacttagctactcctagagagcaacaaattaattagaggcccgcccaattaagcttgagctatatacatatagtcatcgatggaatgaagtatagtaggtagcaagcagaggtcggtcttgcgactgaattgaacacatacacatatatatatatatatatatatatatatatatagggaattactagcatgctaaattggtaatgctagctaaattggtagtatataattaagctataggtgggagatagcaatgcaagtagacagtagtagcagctagattaattaattagaagaaggcgagcctaagctcaaggtcgagaccggcgtcggcgtcggcgtcggcgtcagctggagggcggggcaagtgcggcggtgagctgctgctggcaccgtcgtgtggaggaggaggagggtagttgaggttgggaagaagaggcggcgtcgacttggtggagggggaggcgatcagagctgcatcaggttgatgggtgagcctgagcctggctctgtccctccgatggacgttcatgtggccgccgagggcctgcgccgaccggaactccctcctgcagaagccgcaagggtacgacctcgccttcttcgcctgcaggatcagctgctgctgtctccatgcctcctccctcctactactgccgctgctgttattcatcccctctctctctctctctctctctctcgctctcgctctggatatcaatagctactacttagaggcctacaactcgctgctgctagctagcttatatatatatgcagtcaggcagacaacaccatcggtcgatcgatcgatctcctaattccttctctatgactaactagctctctctctctctctctctctctctctcgtattcgtatagctctagcacggaaatgcacacagctgagctgactgacacagatgaacagcacgcaccactgtacatcatgccctaactactgtagctaacagaacaggtgctactactagtagttgaattgcactgtttttgtgctggatatgcatgccttgaccggcccattcttgtgctactactggttcgctcttgctcgcttcaattcttccgatccaccatggatcgcctcggtaatgtgcgtctcgatcgccatgcatgcacgcactttactttgtcaaaccttgtgcagtgaaatctttccttgtatactccaacaaactgaggcttcccgtccatgaccatcttttttttcttgaactactcgcactaggcagtgtgaagttcatattgatatgtagagcaataaaaaggaacaaaattataatcctggaatatcgtaaccagtgaaaaggaaaaaaataataccaccacccacacaccgacagctctaacatacagacccataagaaggctagcaccggaccggccgccgctaaacgtgaccaaccgccgctaggccaacaaaggaactacagtcgagatcacccaaaactcaatccttaaaaccgacatgaaaccctgctctatccacatctttaggattgagagagagagagagggggtgagagagaagaatggaaccgctctcctcctaggccctccgatatggccaacttgtcgaaactaggacgctaacacaagatgacgtgaatctagagcaagcttgctttagttgtttgggaggttttgacaaggggttgtctagacgagtctccaaggagagaagcgacggagcactgccgccgtcgtccgctagaggggaagtgacgctcgctcgagtggccattcatcaccacctaattttagccgagaaaaaagagttagccaaaattagtttaatttgtattaattcttgaagaaaaaccggtggcacggaaaagagagtagggttgaagaaatactaatttttacactaataagagagttgtttttcctcgatctgtagtgctcccgtcacagccacgttcagttccgtgagttgggatggaggagaaagactaattttcccttgctccttggcacctatgacttgtttcatcaatggatagatttctgcatacacacgaatggcaacaactcgatttatattggtctgtaatatcgatcatacaccatgtatagcattatttatttttatcattaacaaaactccactatgtggtactgtggtgtttttatcgttaattatacattaacatgcctggagttgccacaaattaaacaaacgatccaaactaattatattatacatatataattgatcaagtcgactccagttcccgggcaaaactttgttccggtatgtgcagggctatagaaggatgattaattattttcttattactacataagcagctagtgctccgttcctcagctggccactcaggtcaggtgtagttctggataatcttggagagggatgagtatgtccccacgcaagcgcagcaaacccctaccacgatgatgaatgagcaagctgcaatctgtaaatcaaagccacaatacaatgtacagtgaattaatacatcgctcatttctctccctattattacacattttcatttccatatttttgtacctgatgccaagtcacttttctcttaaggatggccaagaaacaggcgcatggaaggatgtaggtctacaaccgaaaacatgttttagcctcaccaattaaaccgtaaaaacaaactctcgtatatcatctgtggtaaaccgtaaaaacttaccacaagcatggtgagtaaagaaccaaccaacgccataactagccctgtcaaagcttaagaacagatgttatgccgctattcaatttgtcaacgactggtaaccaacaggaaaaaaaaagaatgaacataccaaagaaggggacagatagagcaatgaggagggttgagaccaccagggaggatctaagcatgattatgttcgcatacttctgctgatttggaggcagcaattcttccaaactcatagccaatggggttatggtcaatgcatatgtgattatttgttaagggtatcccagatcgaagagccatatccacaatagtttcagtcatgtaaagtatgatatgaataattgtagtttgagaatttcgtaaagcacgatataagaccatagaggtcaagcaggatcctaacttattcgacggtgatcaatttaattatagtaacacaccaacattgatattgtttagatgcagcataatacctcttgtcatcaaatatttaactgaaaccatgcatattgcaagctagagggtgcttagtaattaggccaatttctagtatcctgaaaattatagctgctataaagtgtgtatttcatttgcacaaatagctacagaaatataactattctaggttaatttgttttgatattagatctcattaaagaaatctgatgcaccaaggatatttggttattggatttgccacctgcaacaaagtcaagaacttactattagcaacaggattgagcataaaggcaggtatctatctataaaagatactccatctgttttcaagtagatgatgttctagatatgcgtacagtcaacccttgaaatcttaactcaccaaatagtgaaaaaaatattaagactttatatgtgaaaatgactttagtatatctgtcatgaaaaatacttccatgtagttatattttttattaacttttacgaatatgtgagtgcaagaagtaatgaccaaacatgtgcattggagaatgtttcaatgtcctgaatgggatctagagaagagcggaggtagtaactgtttcaattagatgaaagatagaaaaaatatctttttagctaatcattatggtgatataactatatagtattgtatatgcacagtatcgtgattgtttacatagacaggaacagaaccgtgctccatttattcatggcatgattatcccaggtaataagcaaacataagtttctgacccatttgtatggttatagcatagtaattaaaggaaatgtttgaaagagttttggcattaccgtggtccagacagcaacctttgaaaccaccaaattctctggtaagttcagcgtgaactgagattcagtggactcaccaaacatcttatatcccatcacagcagcaccggcaaacaaaattgaggacaacccaatactgataagaaacagaagccaaatcttgagtactgcatttgtaatcgaaattatggaatatggactgtatcgattgttccaagttagttaattaccaagtgaaaagaatagaaggaaactggttgcgattcttcagagaagaatagatgttcgggaacacaccatgtcctgagtagcaataaccatacagtccaattgcgatgggaattcctgggagattcagtgcagtccctttgttctcaaaaccaacatggtcaacaaccccaacccagcataggcagacaactacaaggattgatgcaatgacacccccagctacaaacacaacaacatcatgagacgatgtgcagtacatacataaggcacaacaaataacgtgcatgttatttaaacaactctagacccagtaagatgaacagaagaagcaaggaaatgcaaacctgaaagataactcagacagctaaggtcgcggagccaagtggttggcatgactatgagggtggtcaagattgcgaagaacacatgagagtttagtgtcatgctcccaatggttagatgtgcattggggaataactttgacaaattgtcgctctccaatatcaaatactcaatgcaacaggcctgaaacagtacatcagggtcaattaacatgttgtgaaaatgctttaaatagtattactattcagaaggaaataaaaaaatatattatgtttccgtggcaactcttcacaacctaaactgagctaactcatacgtattgcatggttaagttaggtaaatgtattgcattataatctcaagatctaagtaactaaaggtaggtattattttggttctgttttaaagcatagaaatttcaactgaaataaattattattgaagcatgtgacactattatcaatgagcttgaatacatgagaggtcatatcagagttgcaaataatctaatagtgtggtgggctggtggccttgtacttatcagaggcacgtgtgtgactatgtgttttgtcccggatatgaagttgatgtgtgttaattgtatgaattcattccctggggactagcacgtagcaatttcgattgaaaatggcttattagtaataagtacttacatacagttcgatgtacaggattatctgtagatagtggagccacatacaaggaaaaagggttagcacaagagcagtcatttttgcataacctgaagcatacagttgaaatatcatcatctacaagagattttaccgagattgctatacgtccagtggtgccaaaggcggcatgaccaatatcagggtatgtctcaagaccctccttgctgtccagacaacgtcgaaggagcactccggtgtaccaagcgagcacagcaaataagcaaagtatcaccagtccaagccagcctccctgtttaatggcatatggagtcgataggatccccacaccacacagaacatttattcctgcataataggaaaaaatcccctagactaagtaataatacgtaggtatttggaaaaaaaaaagttaagttatttgtcctgagtaaagcaaacagatcaatttcttgggttaagaagaattagataaaaatagagagattggtacttgtacattttattttggatgaagtatttctgcatataatttgataataattatatgggtttgtcttgaagcaaaagtacagcctgcagatctatctacttgctgtttgtgacaactgtcacatggtggggtgactcaaccatgtgatgtccctattgatgccaagaacaagaagaaaagttgaactggtggacctgtgatgcggcgtatcaacaaagagaatagaccattttcaggacaacatgattgaccatttgatgtacttgatgtttgcacttaaactgataaccgctgggctaatctgggctccagatgtttgctgaactaactaatgttttgcatttcgctaaaaaaaaactaaaggtttgggtcttctatcaatgctggtatatcaaataaaatgaaacagcatgtaaagctagtataactactagttcaaaacagtgtgatctcaaattctcaatccagatccttagaaattcatgctctgattgtttggactggtctgagcatcaatacactgaacttggacatgctggtctgtgggagcgtgtccaggttcaccaaatctgattgtgtattcatcaatgctacgtactccatatgacaaggatattctgtggtgccaataagtgagggggtcctatttctcatgttctacttcacagtagaagcaaaacgacttccagaaagtcatatgcaagcaaattatggttggatctataaattggtttacgagaagcaacatatatatctagtatcaatcattgcaggataaataacattctagtatttcccttccataaaggaaaaaaaagaaatgatatcatcattaattaaaattggtagacatgcgtaccattcatcactgcctgggtgtaggagcattgttgataagccggcacctcatgagccggcaccaatggtttttgatcctccgggatctgttgcaaagacggttttcttgagggaagcaggtactgggaactcttacgggtatcatcgtcatgctgctgctgctgctgctggtcgtcgcttgaagatgatgggcgtagaagtggcttgacaagattagagagaatttcaggggttttgccacgaaaagagttggtgaggaatgagttggagagcctgcttagagttggagttcccaaaaagctcaggttgggagactgcacgctactataaatgtcgattgattgcctgttaacatagaagtaagagagaagagttactccatttttatttttagtttagtttagtttgaataagatgagatgagcaagggaggttggcatctagtagtcctatagtatgtggactgtttctcttttagatgaacttatttaaattggaagaatgaggatacagagacagatacagattaattgatgggaggataaaaagagaagaaacaaatctgaattttggcaggaagggaggggaagggacctgtagctttgcggccattggtgggtggcgtaggagcttgggcgcggggtagcgcaggaggagtcgtcggagtcggagtcggagtcggcatccttgaggaggatggaggagtgggggtgggcttcctcgtcctcctcctcctcctcgctctcgatgaggaagctgttgctgccgcgctcctcctctgacgcataacgagaagaagagttgttcatctcgtgggatctcatctcttctcttggaatctcctctcctctcttgggctctgcaagtctgcaactgcagtcctcctcctatacaagattagtagcagtacaagaacaagagctgtgtgtactgatcaatgttagagataatgccaagacctgattaggattaaattagttctcctctctctctctctctctctctcactgtcgcacacacacttttagccccagctgatgcaagggagaaggaaccattggatgactccacacatgcatactatacgattggagtagacaacaagtgcatgattaaggctgtgttcgcacataggtgttcccaacttgcacagtaaacacagaaaacggagcggttcattagcacgtgattaattaagtatttactatttatttttcaaaaatagattaatttgatttttttaagcaacttccgtatagaaactttttttaaaaaacacaccgtttagcagtttgaaaagcgtacgcgcggaaaatgagagagataggttgggaaaaaggggttgcaaacacaccctaaataaattgatgccgtccgtcatcaacgtcatgattccctcacacattactctccttcgcctctatgacgatgattccctttctattattcataaccatattccccttcattctccaattcaactttaaataaacacaagacattactactagtcctagcagcttacatgtcaaattttgctgcatatggttgccgcaacaagcaatttttactgctgcttttctcctaattccaaaaccatatcattggatgcgccatgttcccgggatcacatcaccatcggatccggatcggatctgatgccgttttcaaccaaagattcaaaactgtagtactatactaggggtgtgtttagttcacgctaaaattaaaagtttggttgaaattagaacgatgtgacagaaaagttaaaattttgcgtgtaggaaagctttgatgtgatgaaaaagttgaaaattccaagaaaaagtttggaaaactaaacacggcctggttctctttttctgtttgagagagagagaataacttattgatgagcactgatgaggactcaaatttgacactctcaccctttcatacaaaactaatttcacatttgacgaaaactaaccctcacctcattaccaggatccttcgtcccaaaacaaactaatgtaatacgggatgtgacacattctagattcgtaatattagaatatgtcacgtcacgtactaagtagatttatttattttaggatgaaggaaatgcgtgtttataagtttttgatgggcctatatctaacaaaaagaatatcaagagattcagcgactctgccagatttgtgttcgagccctcgtcccctttcttcttcattcgtttttttatctcctgggaggaggatacacagcactacgttcactttcttatgttttaggcctattaattaaaatattaagattaaattgcaccttggacgagctattattatcaagttttatcctaaaccaatctacacttaatgtttccttttttttaccatgattctattgcttactgggctacccttctcttcacccatctgttgaccaaaactcaccacacacacgaaggcctgagatgtctgcttagatttagtgcaagtcctatcaaatcgggtttaggacatgctagttaatttgatcctataactaataagatagaaaaaaaaaagattagatcgtggggccaattgaccatagggccaatatattatcgtaagcccaaccgatgccgatggaatttcggatcgatcgctataacaacattgaccgaaacttagatataatatatttgtaaatcatctaactttattatagccaatcttaatagaccggaccaaaccgacacaatataagattgaaagtaacaaaattgaatctaaaaaatatatatatcttcgagatgcatgccgatgtgccaataatcaattaagacttatcattgctctatctgaagaaaataaactaacatcggatatgacaacttaaaatataatcaccaacaatttagggttattaaccaaaatctagatagatcgtacccaactgtgacaatataagattgaagataataaaacatcagctagccaattatactaaatcttgtggatcaaccattatggcagattaaattatggtaagctgataattcatcagctaaaactccgatggaaaaatgattaaaaatctattggcttgagcaaatctaaccagcaaattataacctagaagattgaacttaaccaagatagttcaaaattaatggtgagcttgatagatttaaaccaaccaattggtaatactcagtgtgattgatatattgaatctaactaagacaacaaagcaatctaagaaagaatcgatagatcacataggcaacacaagtaaaagcttaactagtatatcgcacttaaccaagaaagtactaattccgccaatacaagcgaagttgatgatacttactttctcgctagagatcaaaactaatgcagcccaaacttgaaaacaaaaactcatcgaaactagaaagttgtatattgaaccgttgttaaattaaaaggaccttaggtgtacatatttatacccataggttagatcaagtccaattctactacagttagatcagcttaggactctatcccaaataaggaaactacatgatacaattccgactcagacatgactctgatcggcaaactagctaagtccgaatccaacacgagtccatcagctcataactctgtccatagaaaatagaaaccaaaataaacgttccttataacggaacgagataaatttaccaaccaaatctacgaaaatcatggtgttaattctctattttgattcagtattggctaacgaaaatggccaaatttcaccgttaacaccactgttggctggccgcacctacctctggcttcgacaacatcgacgcgttgaaagttactttcctcagcttcaggggcacgtgtgtgtaacccttttgtatcctcggcctttagctgggacgagatcggatctaagcaacacaattaaatatctcgtgtactggtctactaggcatcgggtgctcctgcttgaagatgctacgacattattgtggtgccgcctttggtgccttgtctacatggtaggaatggacaccaacaatgagaaagaactaaggaaggatggcaaggaagcattgatggccactgcgtacaaaggtttgatatggggagtgggtatcaaacgagtaggtcaagaggaagggcagaaggtcgcccaatattcaacataaggtaaaagatcatagtttaaagtgaaaatattatgtatgacttggttcacgataagattttagttatagtccaaagtacaatttactcaaataacattgactggcattcttggtgtttcgtggtcaggagtacgaaacaacgtgataacattggcaatgaggtattggatgtcaatgccaagatctttctgtgttgaggtatatgtccattttgtttttgttagagtttgtttttatcgagatctatttcgaaaacaactttcttaagaaagaaaagagcagtgtcccctagaaatttgagtgatgtggtcaggtcagagcgcgcaaagcccaaatgaaagcccacaacctggatctggaatgtactccagtattgttttgttgggtcggcggcggcgggtgagagtggagaatgatgatggctctccgccgcgccgtcggaattggctccgccgccgccctccgctctgccgcctacctccgccgcgcctccccctcgccggcgcggccccatcccctcgtccctccaccgcctgccgcccgaaccttcgccgccccgccccaggtatcgtatcaatggatccccttcaccctcgaatcttaactagtctagtctagtgtagtgtactactatactccctaactactaagtatcttgttgttgtattacaaggtgatgaagaggagcaccaaggacgacgacgacgatggccctcggatcaacaacgacatcacctctccctttgttcgactcgtcactgaccaaggtacggtaccccctctcccgtctacccttgtcctcaccgcatgctctctcactttttgctcatttttgcaggccatagtgttgtccccaggcacgaagctcttcagcttgcggccaggatggacttggacttggtcgaggtacttactgccctctatctgctttcttcttgtaaccaaaccaacctaaacatactagtatttcaattgccatcaccatgtcaaatccatttctttgtttatctatctgtgactctttcatcattcctttttacacgatttaagatgttcatggatgatactgacagtggatataaacaaccaaaccgattcacttgtatttccctctacaacatatctgaccatttgccacatttcttgagatttgcccaatgttcattaccgtttctcttttattcaggtccacagaaaatcagaccctcctgtctgtaaaatcatggattttcacaaagagaagtataagaaagacgttaaggagaaagaacgcctaaaaactaaggtatacttacttcctggctcagttttcttaactatccattgatcactcattcgaccaaggcgatcaacgtacaaggtttgccttcttgtgagaaggtgatggtggtttaaaagacctgtgttatgttatgtagctgtatggatcaaatgcccaacatactgctcaatattgatgctcctggttaatttaatcatcctaccattgggaaagactgttaaccatatcgtccctgcttgtgtttggatctgacaggctataacatatatctccttgtgttgttctggttttgtgcagtctgctattgtcttacgcggtggggagaacaaagaagtgcggtttaagggtaaaacagtaagtggttttttcttgctttagtttgtttattgcagcctatcatcttggctgcaatagattgctgatctggtaactggtatgatatggtcgtatggagtatctagttggcctatcatacttggttttgtccaaggcatttttttttcagtttgtttggatccatatgaacggtgcctagtttgtttggacttctctagtctttctgtttaaattattgaacctttctatggaagtatcaaagagtccaaattatttcaaagtttcttttgcagttacgtttgagaaattgttggtatgaaggcctaacttggaaggttgctgatgaacataaattgttacatgtaggaactaaaagacttgaaggtgaaagcagatggaatcaccagattaatggagcgaggttacagggtgaaggtcagcttacattccatttccctttcttgcttgtaccactgtagaaaaggtcactttgtacaggcacgtaaccgactggttgcacgtatgtgagtagtaaagcaacccgaataagtgaatcatgacggattttaggtgtgtgaaatgttgaaatggcctgctagcctgatcaagtggccgattgccatataatcacagagttaagatgcttaattctcatattgagcctagcagtccaactaggataatccgtatataatatctatactgcttccatcatcttatgagggtaaccacatgagtagtacaaatatgctttttaataattacaattgaatgtgttcaaatgtctctaagagcaaacaagcaccaagtatatagattcattagcatgaacattaaattatccatataattctgaatagtcatctgtattccgacttatcacttgatggtaccttgtccatccgatacgcgtatccagacttatacaacactggtttgtacagctctgccaatatttagtgacaattcatgcagtttctgttagcatcatcttatgctttgctttgtctttttttactatcatttactccctccttcccaaattgatcatcatctaatggacttcaaaatttctcaaattgatcatcatataaccgcatggacatggatttcatcataatacaattaatgcagcatgagagaatgtgtgcatgctaaggtgtaattggcatggtgttttgatcgatgcatgcattgtgggagaatgtgtgcatggttgtcttgattgatgtgatttaaattatccttggtcttggtgcataaacatatactccctccatcccataatataacgcatggtaaaagttacacggtctccaaaactaatctttaacttataatttctcatatgctataaggtttgtagcaacaaaattataatcatatgaaagtaaatttaaatgtcaatctaatgatataatttttaacaaataaaattcatttcatattatattaaatgttggtcaaatgttttaaaggttgaatcttgaaatacgtgcacaccttatattatgggatggagggagtatgatgatcattttgggaaggagggagtatataattactttttgtcatcagaggcaacagctgtcggttttctagtcaaatattgctttgtaattttcagtagacgattatctgagaaaaatatgccaaatgatgggaaatgatgagggagctttgctgaagagtagcgattcttaagtacattgttctccatctaatatgtcacactattgcattttgacactagagagttgctccactggtcatgtttgcttagatattgccaccaggaatgtggtaggtggtgcaaaatgcacaagctgtaaatctcacatgaaaaatcaatggtttgggtttgggtgaagaggtcgtaccaggtggtagagatcatccaggttgagaggatggcagctgtagaagttatgtcgtttgcagacttttacctgtttcagtaatagatgcatgatttgttttggagtagaacttatgtctttgttgagtgtagatcaaattcctaaccggactgttattgatggtgtgatggtcatgtactcatgttatgcaatggttctaggaatccagatataaattttatttacttttctatttggatgatactgtgtttgcatgtaacagtattttctgtatgttctttctttttcttgtataaaccagtaacaggcacaagaactacaaattcaggagaactttcttcctcttcttaggaaaaggccctgctgtctcttgtctagtttgatcaagaacaatagcagttggaattgaactgaacatggagaattataagaaagttttttttttctttggtctctatttcaagcaatgagaacctgaaggattttggtctaatttttgcctgatttactatattagcgcattctgtgcaactgtcaccaacattcatatatccaattttaacttgaacttcagttctgaatcagttaatttcagctgtcttttattgtaatttttgtgcatgttcatatgcatatgcatttatttgttataaggtcttgaatacaaactctaaaattattttaaatgtgttcctatttggcagtgcatggcgatgccctcaggtaatgaagaagaagatttaggagggccactatctcggttgttaggacttgtgagtgctctgctccttattattttcatgttgcttgcaaccaatgtcagcaaattctgtttgacaactgtttgatgtcctggttacattttcggagctgtccgtaaaatgatctttttatatgatgtcgtaaattgaacagatacaagatgtctgcatagtggaaagtggcccacatttggactcgaagcatgcatacgttattgttaggcatgtgaagtttgcaacaaagaaagctggaaagaaagctagcaaggccatagaagatgtaggcaaaggtgcccgcaagaatgcctctgaattgtcaactgttactgccgatagtggagatgagacaaatgattgtggaaatggggccatctcagatcaaatggacaacgctcctgcttacgtctccaatgaattttccatgcagaaagatgcacatgatagaggctctagaagggagttgagttggtcgaaatcgaacccgggcaactacggtgaaaacatgcaaaatgttgatgctggggcacacagaattagctctagtcagcgggcagcacaaacctcagagggtgggtttggttccaataatgtaaaatctggtatggaaaagcaagaaaaggctaatgaagatgtggtacctgcagaaaccaacagatacgccagccgaagacagcagataagaggagataaccagggtttgagccaagatagatccccgcaaggtcatagaaggaatgaaaatgaagttcgctatccggtcaatgactaccaaagacctctgcagcagaacaaccgacaatcaccaaggttcaacgatggtagattaccacaagaaccaagaagaaatgaaaggggaggccatattccgttgaataacaaacaaggccaatttcagcaaatgaatcatcctgctgaatcagcgggtaatggtgcaggctatcctactccgacggccaagagttttggagttttcagtaccagaaaacctgctacgtctgagttggggaaaacaaatggtgctagtaggactgctaattctgatgtacctaaaagctatggaatctttagttctcctagaagggaatctggtgataaaagctcatgaatgaaactatcagcagataagcctataaacagcaggtctacatcaaagtttgtcgtatttggaattggcacaataagcctcgaaatgtaaggatcagcatgtgggtctcatgtttcagtttttgttgatcattgactattattcattcagcctgagcatatctacgtggcggtggcacggtgagaaagccaactgcaagcttgagaggtactgtactactcctatttgttaagtagcttttgggtccacttgtattgttatcatttgattggaagaatcacacctgtttagactagaatagcccttttacttgtcaggttgatcgaatagtgaaaaataatgtcatgagtggtcggatccatttgattgtgatagcattttttactacatccatcccaaaataagtgcagccgtggatatccgtgcctaacgtttgaccgtccgtcttaccgccataccgcaatagtgttgaggcgggtgtgcagcgccttagctcgccataccgcctaataaacttgatcttaatagatcaattgttgatcaaaaccttattccaatataacaaaatacactttatattttaaaacggggaagtactccattttaaacaaactcatgaggtaatatagatttgctcctatattttacagttccaaaataaacaatgataagaagaagaatagagtaatatagttgttagatgattgttttggtttgtaatttaggagaaatatatgtgatggtgtcatgctaaaatggccaaaatgtgattccgtaaatggggttggctcatcatcaaatggtgcctaaatggcacttggtcagtttctaattgacttgcttaattttgttcttttctcaatgtgaacggatgaaattgaccttttgggctgtgaatagaaacggtgagcagctccactccagcacaggtgccgagcatgagcagccgtgtttagttacaaaatatttcttcaaacttttaactttttcatcacatcaaaacttttctacatacgtaaacttttaacttttccgtcacatcgttttaattttaaccaaacttttaatgttagtatgaactaaacacagctagctagagcgaggcggccttgcattgttctcagtcacggtcggtcggtagcagcgacagcgagcttaattaattggtggtgatctcgatcggcatcggcggtgacactttgactccccgcaccgctagctggccggagctccacctcccccggcgatgatgcctcgtggatagcggccggagataacctcgtggcttcagctctactacttcttaactgatactaatgcttattcttttaactatatccaaactagcgagtttagtacatgttattattatgttaatatatatcaataaaatatcaaacttaaaattataaaggtgatatagacgagatagagcgagctcggtcgtaagcaaaatcgaccttgaccttttaaactcaataagattacgagtcgagacaagctggctctctaagataacgagtttaaatgagctgagctagtacctaagtcttattttatcccccaactataaaaaaaacactctttttttctcttcaaacggtttggatgatatatagatttatcctacgtggcaagttaacctagttttcatctgatgtggctcttcaatggtattacatttggaaagaaaaatagaaaatacaatgggacccacttatcactctccatcctcttctttctcttttcacctctccactcttaagctgtgttcatttggtggggttggaaacccctccactcttcatgcaaaacaaaacgatggattaacattattaattactaggtattagcttaaaaaattgaaaaataaattaatatgatttttaaagcaatttttctgtagatttttttttcaaaaacacacacctttaatagttcggaggagtgcgcgtgggaaacgagggagtggaggttaggaaccttgagttaagaacacaaccttatttctcatgtgcatgcttcctaaattgctaaacagtgtttttttaataaaaaaagaatgtacgaaaattgttttttaaaaaatcatattggggtttaggtaatcctatttattaagtttttttaagctaatacttaattaatcacatgctaatttaccgctttattttcggtgcgtggaggattagtttccaaccaacgctaaagaacacaggcttagtctcttctggtcaatggtggtagtactcaagtctctttctcggtccgttctttgactatcgtggtccctacagtgctctgagcagctgatggaatggaaccctcattcctacttcaactatagactcccttcacctattgaggccagggccgtctccagtactttggggcaccaggttgaaatacaaattgaggccctataatttttttaaaaaaagcatgtctaatataaacaaaacatattttcgctcaattatgtagatgcaatatgtgctataatgtacactattttaaaatatattatgataatcatactaaaagagcgaagaggtaaggaaggcaggagccaggagcccaggaggcagctgcacactgcagagctgctcggagactagaatctacggccatcgcgctgccactcagagtcgcaagttgtatcgtcgcctcgctggtcaccgcggcatggaattgggatcgacaatctcgtctcattctcgtagcagccacaacgcacgcaatcacagaattaggatcgatgcgatgatgttgcagtgtcgtacgcgtggccacctgggcttggcgatttgccttgcatgctatagttgtgggcaatagactatagtccttcatcttcacatgggcccaaaaaaaatcatagaccctatgcggtcgtctatttggctcttgggcatcaacgggtctgattgaggctattggtgccagtgtgattgacgtcaagacattgaaactcggttctaataatcttgacgtcgagaaaaatagtttatttctaagtaagttttttataaaggtatatttgtaaaataaatttttaaagagctaaaacataaagaaaaacaatgacgccccagggcagccaaaaggactacgaaaggtggctgcggcgtctgaggctgttatgatggaggcatatgtcacgtgatgtacgtgaggcctatgtgttgtgagtagggtttctcaaaccgccggggccggggttaccgcaccccggcgccgcggtaaccatgaaaaaccgtgcaaaatttatcaaaaattcaaattattttttaaatttatttgaatttaaggaggttaccgcggtatttatattaccatactccgcggtaagccctggttacggtggtaacatcaaccctggttgtgagtcgaaccattgattgatgggcccatgcaccagcttggtgctgtgtataaattgtgctcatgcaagaagcaattaaacggataagttatacaggaggtgttcttttcatccgataaagaagcaaggacacataaaatagaagtattatcaatatatgattaattaagttttaattattactcctataaacttaaaaattggaaacaacgacacctgataccttatttagatggaactaaaacttttaagctcttatcacatcagatgtttagatactaattataaatattaaacgtagactattaataaaacacatccataatcttggactaattcgcaagacgattctattgagcataattaatccatgattagtctatgtgatgctacagtaaacattctctaattatagattaattaggcttaaaaaatttgtctctcaaattagctttcatttatataattagttttgtaagtagtctatatttaatactctaaattagtgtctaaatatagaaactaaagttaagtctctggatccaaacaccacctgagtgtgtcagaatgcattgcacaacgcatctggggttggggttacagaacggattgaaggcagcccgggtgcagctaggtagcattaaatatttgtcacataataaaaaatctgatgtgacaagagagttaatagagttaatgacggaggtaaaaaaatgaagaaatcatttctctcgcaaaaaaccatctctacgcaagaacaaataatgaaaaataggaaataggtggataaaaagagagaagagagatgattggatgagaatttaatttgacgacatcatccattgaatatatagtttttatacagtatctacatgaataacatgtatgaaagctaattgatagtttgatagtttttttattggggatggcctaatagtcccagatttttagcgcatatgcattgtcaaaggacttcctttgttccataataaatttatttttagccatttttattgtctcaaaatgaattcttattttatttttaaagtaattattacattaaagtttataaaagtgaaaaaaataatattgagagtagataaaatgagaaatagttacattaggatttgatattgtagaaatattttttaaaactttttattgatatatgtaggatttgtgaaaaataaatttattttaggacaaaaggtaaaggtgtactccctccgtcccataaaaaacaacctagtaccggatgtgatacatcatagtactacaaatctggatatacatctattcagatttatcgtattagaatatgtcacattcgattgtagattcgtatttatcgtattagaatatgtcacatccgatcgtagattcgtttttatggaatatttggatacaggaaacgacgaatgaatggatgatggccggccgtatatccatccacacttccaccacagtccgtcagtcctaccttctacagtactgttgctacaatgactactggatcagtcgtttcagtactagtactatggagccattcaattcagctcgtaccctcaacagtgaatactatgggctattcagattgatattattttaaaatttaaaccatattactttttactaaaattatcaaagatgtgtatgtatttagtttctcgtcaaattgaggtaaatagataagaaatcttataaaaattttgataaacgataatattgtcagtttatcaaaatttggacgctagtaagatttattttggctagcctctatatcttccgttttaaaatataatagattttggttaaatacaatgtatcctagtttttttttgtttagggcctgtttagatcccacctaaaaatgttacaccatgtcacatggaacgtttgagcacatgcatgaagtattaaatatatgcttaaaaaaatactaattgcacagattgtgactactttgcgagacgaatcttttaagtctaattgctccatgatttggcaatgtggtgctacagtaaacatgagctaatgacatattaatttggcttaataaattcgtctcatatttactgtcggatacttattttttttattagtgcataaacactccatacaacaccctatataatacctgatgtgacacactaaaattttacaccccctaataaacacctccttagattggtaatataataggtcccattcaatcaaaatggagggagtgatacagtacagtaggatgcagcatggacgcttggtctttgttataatgcgctcacgatctgtctcatttgggagcagccgcctcgccgcctccgcgccagaaccaccatgccgccacgacagactcgcgcgagcactgccgtgttgcttcacctcgtggcgcgcgggcgccgccgcaccgtctctcccgcgtgggagacggctcgccaccgggacaaggcctcgccgccaccatcaccgggaagaagacggaagagagaaggaagaagatggagaaggaagaaaatggatggaaacctaacggcagtggtatggttacgaataaacgaattgtaatattatttttctgaatagcaaaatttgtagtggtatagatcaaattaacccataataattcaacgacgccgtctttaaatataataatatatacatgattaataatatgtatatatgaataatagaaatatgatatatgaccgctgactgatcatcatcatcatatacagttctgactcaggaattccgatatacggaattgctatctgtttggtgacagatttttgagtcacatatcttgcagatttatgtgcgttggatggtgtcaagattcgtggtgcatttttgccgactccatcattatcgatttgagctatgttttctaatgctaatttgtttatgatcccacacgtactaattacaccgtacttacactgtaattatatattaattacatatgtaattttagtgtatttacgatgtaagtctgaaaattacatatgtaattttagtgtatttatgatgtaagtctgaaatcaacttgagcccatttgagtccacgtgagcttcagattgtccatgtggcctgtttgtttgttgttttatattttgtttgtgtatattaatgtcatctgttagatgttcatccaaagagtaagaaatctgtatgataagaggctaaaaaatctgtcatcatctgttagatgttcatccaaagagtaagaaatctgtatgataagatgctaaaaaatctgtcagatgatatataggcagtcccatatacataactttctatccatcttaaaataagggtagttttgcattgattgtatccaacgtttaaccgttcgtattatttaaatatttttgtaattagtatttttattgttattagatgataaaatatgaatagtactttatgtgtgataaaatatgatagtgatatatatcttgtaggtgtataccctacgcctacggcacgagctcgagacgccatctgtgccatttcattccatggccatgattgatcgccaacgccacgtaagacaacagaccagcccgatggatcttactccctccgtccaactttaagtaaggatgatattaaggttggacatcacctagtacaacgaatctggacagagaactatcaagatttgttgtcttaggttatctcatcctcaccaaggttgagctttttttttcacggagggagtacacacactcgcacacaaaatattatcgctgtgctgtgataccaaatcgctcgttctggaaatacaagtggtgtgatggtgaagttgtgggtgcatgactttactgggttcaaatcctggtgcctataaatattatgcacaagcaaatgaaatttcaacatgactttagtgagatcaggaatatgcaattggtgttaggggcgcattcgcgggggtgtaagtgtgtgttaacgccaaaatttggtaagattttttaatggattcggttaaggaaagagcacaatgagcctatggaaagcttatctaaaagagttcgagtttaagaaggaaccatggaaaccacgtcatagcagtttagtttatctattagttaagcaagttttgtatttaggaaagtatgattcatgtccgatgaggattttatgttttttcttttatctttagaaaagtttgtttagtatccgctcaggattagtatccactcatgggtataaatatgtacacccgagatccttgtaatctatctatcggtcaatacaacttcggcgcatcgccatcctttttattttcgtctttctcgacgaggtcttgtttcgagttgggctgcatcggcttcgatctccaacgaggggtaaggcttgttatagctatttgtatcggaagggctagggcctcgacactctaatattgttgatgtaaacacctatttatcatatatcttagttaatctaagtcgaagtctcaatttacatgtatcgactagatcttttctagggttttattggtgtcagttaaattgtttcatcgatagattatttactcaagtgtcagaatttacattggaaatatagccgattgttcaaaactctattgacatcgcctggtataagcatcagctagcatgctatatcggcttattggacaatcgactcattgatctctaatttgtacatcttgtcagttacaagattaaactaactagaatgtgtgtatcttgtcagtattttggatctgcactggagctaagcagatctctcaagtcgtcgtgtcttttcattaacagtgattggtgttacgtgtatagtggtgtgtggatgtgtgtttgctgggtaatctcagaaaaaaaatcgttcgacagtagtacataatgacaactttcaacagcttttctgattaatttaatgtacttttttcttttgttagctacacttcacttgggttaatactaatgcggagtactcccttcgttaaaaaaaatcaatctaagagaggatgtgacctctcctactaaaacaaatatgaacacgctgtactagaaggaatctgttcagattcgttgtaaggaagggtcacatctttctttagattggttttttctttttttagagcatcaccaacagcctatctaaatcggactctccaaacaactatatagccaactcaaacacctatataaccaattcttcatctaatttgactagtcaaactagttactcgctctaaccgcctctatatctacccattctattttaattctatgacgctggtccccacacgtcaattgcttcttcttcttcctcctctcccctacttcctctttctcccgcgcgagtcgacggcgcggtacctcgcgcgagcctgttaattactcaactctaatcaatttaactaccaagcctgttaatttgcactctgcaggcgtgcattggcaatgacatccaaaataaaaaaaaatcaccgagatgaaattggtacgcagtaaaattccaataactggtaggactgcaaaattcagtagcatacacacccgcaggacgaagtcctcctgcttccagacggtcaggcagcagaaggcgagatgcgcgaccgcgacgccggcgctgctacacgagtccgactgctgctgctggctcgccgtgaacgcaaagcagaagccgaggaggcggcagagcaagaacagatgctgcatcgaagaagaagctgcccccattggcttgccactgatccccgtgccctgactgctcttctccttcctcttcttcttcttcttcctcttcctctcgtgcctttcttgccatggcttagctcagagaaagcaccggccgtcgagctcctcgcgcgcggcagcggcggcggcggcggcggcggcggcgcggagtcctcctcctccaccggggtcgccgtgcagctcgccatggtgcttctcgatgaggagctgcgctacatcatggtccaccaaaccgtgcagctcgaccccacgggcatcttctccctgcgccgcctctcactcggctccatggacgacggcagcgccggaggatgacggcggcggcgccgggaggacgacgactgcggcgccgggtggacggcgacggcggcaccgggcggatggcgccgcgagcagggagggagcagcagacgggatggggaaagagggagagagaaaggagagagggtgtgggacccacaccgatggcaagccctctggctggccaactttggcaagtgtggtgaggaatttagccagccaaataacttagccatccaattagtaagtctgttggagcattttttttttctaagttagctaaattttgacttgaatagctatttggccatccagttggagatgcccttacggagggagtatagctcagtagtcatatcatacagaagcttggtgagggtgaaagcaattaaggtccatagatggaatttatgatcaatttatgtgatgcgtgcagatgtagatagatgcaacacatgcacgcagatgctgcagcctgcaggtcaggtccatcgatatcgtccaatggctctgctctggagtcgatctgactgatcgctggctggctagctagctggaacgaccttttatattgttattatggtcggaagattaacaacaatgaccagtatattataggcttaattagatctcctccctccatccaaaaactttaacttctagagtttaaattttatcacttcaataccatttacctgacattttagtcattcttcatctccattatttttgtcttgggatgttaggattggctttttttttacggagggagtatgtcagtgtaacttttacggttttaaaatatatcattactattcatttatctgaagtaataccattacaattttactgttatttgaaatatgccactacttacctcttcaatataatttctagaatttttacaccaaattatccttcttcctttttttctgtctctcctgttcatcttctctaccaactagatccctcggccactaagctgaatatcacagcagcaggccctactactccctccgtcctatgatataagagattttaggtggatgtgacatatcttagtacaataaatttcgataaacgtactccctccatcccataaaaagccaacctagtattggatgtgatgttttctagtctaacgaatctagacagactcatattcagaatattcattggactaaaaaacatctcatcaaatattaggttgactttttatgagacgaagggagtatatgatatatcacatctatctaaaaccctttaaattttttttttttgacagagggagtacgtagaagtacgtagaagcgagcagttgttgtggacccaattacgcaggcatatgcagcaacgatgggtcaaaccaacgactactccaatcaccaggacagtatcccaaggtgaattagctgccgtgtttgctacattggtgcatctactatcaataccattcgtggtggtcgatggggtctgtgtgtcaatgcataccgtagtactactatctccgtagcagaaacatcatggttttacattgtttatgtcaaatatttaatcgttcgtcttatttaaaaaagttctatgattactatttttttattattagatgataaaaacatgaatactattttatgtgtgattattattttaaaaaaattattaatttttaaataagataaatggtcaaatattgaacacagaaatccaaagttacactaaaatgtgatggagaggtacgtagtactttatgcagacccaccctgtgttggaggtacgtattgttcgtagtacttaatacacgtctatcgattgatcgatcgagttggtacgtattctcaactttttatcatatcacatcacatcgaaaacttttctacacatataaactaacaactttttctctaaactattaactttctcctaatttttcaccttttcctccatctaaacacagctatactgtccgtccggacgctggcgtagtatgtaggagtagtacagtaacactagtacttggaatgcttggatagctggtgtgggagcccacaggcccagtcacccagacccagtgatttctacgagtatttgctcaaatatgcatgcaaatctatggcagatctatcaatggcatactggctcagtcacagtttactttagagcgagtacagtagcaggctacaagtcagctgtatacacatgtggaggagagaaaagaagagagaagtaaagcgagctacagatttatagtcagctgtagcacagactctaatacattgtgtgtgtatgaaaggtaggaccatatattagtagtatagtattcttattgtataaatgagctattaaattggctatagaagaattggagcgcatagttagctatactatttaaacttgctcttcgatgctgcatgctcatgctggcctggtccaaaagaaattgtactgcccccaacacacacatacccacccactagtgaagatgaattgaatgccaatgggagaagaggagagcagacgattgaattgaatgcggtactggatcaaaggcagacaggcagccatttactcgcccatgtgcactgtttatttgcaggtttctatccatcaagtagtatgtactagggcaactatttttatccaggagaggatgtctccttgtttgtttaaaatttatttaaatagttatggaaaaaaaatctcataacacttgataacactccatgacatacacacgtataccacattataaaatcttagatccaaagtcaactcacacatcgaaatgtatgaataatagcgtattgttcgtatctgaatttttatttcaactagaaaaaatgcccgtgtgttgcaacgggtgaaggctattttaatcttattattgttatatggtttatttaagatgaaattcactgttaaatttgctcggatatatattttattagaaaatcatgagctataattaggagtccgatcgtctcaagttagcatgccaatttttttaaacagatttcatatacaattcattttgtatttccaaaagcgaacgaacttaaaaactgactcatacatggatgacgtaccaaactaccggcaaaaacatcttcaatttttataaatacccgtgagttgcaactggtgaaagctattttatttattattgttatatgggttagttaaggtgaaattcacttgaatatatatattgttagaaaattataagctgcaattaggagcccgatcattatttcttatacgatttcttctatatttccaaaagcgaacgaatttaaaaaccgactcacatacagatttgtatttccaaaagtgaacgaacgtaaaaaaccgactcatacataggtgacgtaccaaagtatcggcaaaaaaacatcttcaatttttataatagtagagatgtgtagattggactaattttttttttactgatagatgtcaccgtactctacattatttttttggaacttttaacaactatttgtattattattgagttttttttaaaaaaatacataacagaacattctcattagaattcattccctatccgctactatgtgttgtcgaatctagataccaggggtactaagtatccactaattagctcgttaatcgtagtagcaatttgtgatattctgtcagtaatcctccctccagtttaaaattattgacgttttaaacataatctcgtatagtgttatattatatgttttcctaaatattgactttctgttgcctggttggtttgagctaatcaccggccggtatctatatatgcaagccgtgttcgattccaaggctagaaagtcagtgcgtaatgttgcggtgccaacgaatggtcaactgaaactagtcaacgcacgtttacaattatatctgaagtcgtgtatataaaaaataataactatttagatgatgtgcaagaaaacaactcctagtgatcatagtactatatactctcttcgtttcaaaatgtttgacgccgttaactttttagtacgtatttgaccattcgtcttattaaaaaaatttaagtaattatttattctttttatatcatttgattcattgtaaaatatactttcatgtacatatatagttttacatatttcacaaattttttgaataagacgaacggtcaaacatgtgctaaaaagttaacggtgtcaaatattttgaaacggatggagtatctagtatgggttgtactggtacagtacgtacgtaggttgccaactctatctagtacggggtacgtaataatagtagctaggttgatgcaaattgaaaatatatgttgcgagcggcggtgttaagtgcagtgcacgccaacgataaatcatgcttgaatttggtcgtctataaatactagacaaacatagctagctgcctggtgctactttaattttactgagagtgcgcggtgctgtgcttagattcaattcgctggcagtacgtagagcgtgtagagatagaatgagaatgggaggaggcagtagcgcggcggcggcattggtggtgatggtgttgtgggcggcggtgccggtggtggtggtgcaggcagcgtcatcgccggcgctgatcgtgtttggggactcgatcgtggacccggggaacaacaacggcatcaacaccatcatcaaggccaacttccctccctacggccatgacttccacaaccacacccccaccggcagattctgcaacggacgcataccaaccgacttcatcggtaactagcaacatgcttttctttctcttgtcaattctcatttctcataggagtacatgcatgcacaacaacaactaacaacggatcgatcggaatgcatatgcagcttcccgtcttggtctgaaggagcttctcccgccgtacctgtcgccggagctgtcgactgaggagctcctcaccggcgtcagcttcgcgtcggggggcaccggcttcgacccgctgacgcctcgcctggcctccgtcatctccatgcccgaccagctgctgctgttccagcagtacaaggagcgggtgcgcggcgccgccggggacgcgcgggtggcggacatgatgaccaggggcatcttcgccatctgcgccggcagcgacgacgtggccaacacctacttcaccatgcgggcgaggcccggctacgaccacgcctcgtacgcggcgctgctggtgcaccacgcggcggcgttcgtggacgagctggtgaaggccggggcgaggaaggtggccatcatcgggatgccgcccatcgggtgcgtgccgtcgcagaggaccatgtcggggggcatggagaggcgctgctcggaggggcacaaccagatcgcggtggcgtacaacgccgggatgaagaggaggatggaggagatgcaggccaagaagaagagcaccaagaccaagcttgttttcatggacatctacggcttcctgatggacatgatgatgcgtccacgggcgtacggcttcagcgactccaccatgggttgctgcggcactggcctcctggaggtttccgtcctctgcaacgccctcacctcctccgtctgcacccccgtctccgactatctcttctgggacagctaccaccccaccgagaaagcttacagcatcctcaccgacttcgtctacgataattacgtcaagaaactcctcctcgactaactatatatctctgtccatcattattatattatatatatctagcttttgctttaatttgctccctcttttttgtttcaacttttattggattatataatataatagtattgcttgctcttcttcagctaagccaggttttcccttaattatttcttcccttataaacttactccacttactatacgcaaggatgcatatgtatgtgctagttattactaatatcaattaattcctctctctctccgcaggctgctagtgctagctagctagagccctgtaaatctttgtcattgatgattaatcgtacgtttcccaaacaggcagctagggtatcttcatttcgtaacagtaattaatctacagtagtagctagtacgggtgtaataacatacatgtagctcgcatgttttaagactcacaaaattacagtcgtactagtggtataataacaaggaattgaagctagctagtatattatatatatatatatatatgtgtgtgtgtgtgtgtgtgtgtgtgtgtgaaattagatatcaaaagtctggctgacagcttgttgcccgctccgctagaacagcaagcatatgcacctcgatctagacttcatgtagtggagtatgatcttgaaccgacagatataatatgatggaccgagctccagttcttagagctttgacgatggcaggcctgcatcgcatatatattcgcatgcagttaaagttaattttaactaggcaatgaataggaattaactaacggtacgtagtagtaccgaccgagttgtttggcattaacaatgctggggcaagcagctggcggcgttgcatcctccttgagaaatggctccactagattcgggttcccccaaaccggataacccttgatcttgccctgcattattattattattaccgtatcagcaggtttatataatcgatctagtgcaaatacaaacatgcacagacagacagacccactcacacagtgtgtgttccattcatcatcaatagtataatatttgggctgaggctaattaagcatgcatatggaaggagtacttacaagaacgtttagagcagcaagtgttgccattccttcgcgcgtccactggagaattggagaatgatgcaaattatatactatattagtcagtacctttttgattcatattactagtagttgtaggagtagtagtacgtaaagatggatggatatttttatgggaagaaagaaagaaagaaagaaaataaaacaagctagctaggcatatatatatatataagcagatgcagcaggcaggtagtggaccttggaggcagatgcgatgtgaggtacgacgacggcattcttcatgtcagcgaggccgggcttcatgtaaggctcatcctcaaacacatcaagaccgacgcggaacatggggttggccttgaggtgctccaccagtgctacctcatcaatcaccggtcctcgacttgcattcacaagaaccgcttcctgtatttttatatttagattatttgtatacatgctctgttaattacccactgcatagtactacagtatcaagaggaccgagagaagaaattaacagaggcagagaggcaggcaccttcttcatgatggccagcctttccgggtttatcagatggtaagtggtcttgtccaacacagggtgcagactaatctgccacatacatatatatatatatgcacaagcatttatttgcataattaatcaacatcttaataattagaatgaagaaagaaagaagagacgatgagagagatggctgaccacgtcggcctccctgaggacatcctccatggtggcggctctcttccatgtcacaggctgctctccgtttgctttcaggaactgcccgtaagctacatgcatatgcattcaaatcaatgtgcaggtcattaattaatctaatctaatctatctatcttaatgtcgtactccctccattccaaattgatctacatatagttttttagattatttctaaatgatctacacatttgtgttcatttattagagtctattcgttatttgtgcattggagtaaatggacattgatgcatgcatccatgcacacaagtatttataacccacatgcaatattttgatttgctattggctagaaaatattagggatggtgcatgcattgaatttgttgctagagtaaatatagtatgagagagttattagtttttattgatcttggtgtacctatgaaatatgtagatcaatttagaacggagggagtacaaattaactagccagtactataaaattggatgcatacctgtgacgaatttctcaaggcgcgtggactgatacaggtcgtagtagatcaagttcatcttgaagccctcgatctgtggtaaaaggaaatgtttacatgagtaattttgtggtgcaattgcgaaattgaacaaataattactcctactataataataatagtcctagctagtaaggtaccaactgaactaaccatcattcttgcgtaagctgagccgattcgaccagctccgatgactcccacagtctgacccttgagcaagttccccacgaacctgcatgcacatatatacatatatacatatatgagtatctatcaactagcagcagtagtaaaagtaaagagagagagagagagagagagacaggtgcgggagccatccgtcgtagaggccagccctcatgaactgatctgcctccacgatcctccgcgccgccgccagcgacagagacgcggccagctccgccgtcgtctccgtcagaacgccctgtacatgtgtacgtatgtaagtaaattaccatccagtaagatagtctagaaatcaagaagcagagggcggcagaactgacaggcgtgttgccgacggcgatgccgttcctattggcggcctccacgtcgacgttgttgtacccgacggccatgttgctgaaggctgttccgccggcgcgcttcagcgccgagaacagcacctctccccactcctccgtcagctgcacttaatttgttatcaacaagaagaaatcaatcaaaattattggattgcaattgctttgcttgcctggccgatgacaccatcgcagcgatcgccaatgagggcgaggatgtcgtcgacagagaggatggtcttcgtctccgtgcagatctgaagcaaggaatgaattgactctccactactagtgtaattgtaatgcaataagtaatcgctgcctaagaaggaaaggaaaggattacctcgaggcggcagtcgttgtcggcgaggaggcggatccagcgggtgccgggcatggacttggtgctcaccacgcgatactttccgctcggattccacacctcgatcgatatcggcttcgccatttcttgttttgctttcgcctgccttgccttgccttggactcgctactgcttcttgtcttgagctcactctactactagtatactactagtgtactactcccaactttatcggctaacttgaggcgccaaaattattcgcaaaacaaaacaaaatcatggatggataaggggcccaaatatacgtgtggcaaccaacaccaggagagaccagacacacccagccgccttatcatctttctttctttctttcctccaggccaaggcttggcctggactcgctgctgcctcaccacctggcacttcctccaacactactgcggcacagattagatagatagacagacagacactgagacaatggacgacaatcagatgactttataatcccagtaataaatcatccatccaccagacgatatcaactgcagtctaggcagccgcacataacatccttatagtaacaatcttcagtttttgttttcccttccatacccatacttcataaaccagctagttaacctaacccccatttcatttcatccttccttcactaaccacaccccccccccccaccccaccattcattctcactccaaaataattacaaccattgcaaccgaccggccacatgtagcagctgctgcatctctactcaaacgcccactggttctccctgcggatctcctcttcctcctcaggggccaagtccttcttgatgttgaaggtcttgcggatttcctccggagtcttgcccttgatcatgtctgcaacggtctgcgcaactcagatccagcaatcccatcccttgatgttgagatagtttgcagcctgcaagaggtggacaatcaatttctttcttcctttctacatacagaaaataatcaacacatctaggcacacttgagttaaaactggaacagaataacaaaggcaggtaagcaggcatacattatgtttccaaagagcaaatcaggtggaccaattcatccgtgtgttaggcaagtacttcacaagtcagatctatatatctcaggttaacaacaataaaactaaacattttatcaacacatgcttcacaattacataccaaacagctctttgcttcttcaagggcaacatatttttccactatttattatgtatatatgtggaaaatccattgagacagactaatacaggaagccactaacatgtcaagggacttggtagttaaatactatcaaacatctattgtccttttaaagagcagcaaatcctccaattaaacatggatacatgtgcactatccctagagaaaatacaggtaattaggaggtaagaggaaagtaacaagtatggaaccaattattaggtaacgttagcccactagtcacagttaattgttggtttctaaaaaagcactaagctgtcacaacagacaagtagacaattaatgacagaaggatcacttaaccacattgcctaaatgaattgaacatcaatatatccacatgtttaaaaagggtaccatgattataaatttaaaggctagcacaataaatataagtccgagcatcaattgtactgccaagtatgttgcaacagtaacaaaaacatataatgcattaggaaaacctagaagggtccattttgggagggggggagacaaggaagcatacaatagatttgagccacaaagacagtagatccgaacttccaacttttttcatcacatcaacctgtcatacacacaacttttcagtcacatcgtaccaattttaacctaaacttccaactttggaaggaactaaacacaacctaaggcttagcaagccaatgcatttatggatgttaaaagtgaagacagtatcaattgacacaaactgacagcgttactggtagaagagtaataaacccaccacccatcaacattgtccccaagcacaagaaaagaagagcactagttgaaataaatggaaataaaaagcatggcagcccctagagttgtacacaatgggtttgatttgggagataaaacaaggacacgcaataatcatcagataagctgtgctaacaacacgcaaccagattcacataggcataataaatcatctactacctccgtcccaaaataagcacagtcatgagtttccacgcccaactttggtcgtccgttttatttaaattttttttataattagcatttttattgctatgagatgataaaacatgaatagtactttactcgtgacttatgtttttaattttttttaaaaaaaaatcaaataagacgaacagtcaaagttcggcgcggaaaaccatggctgcacttattttgggacggagggagtagttacttatttaagacgtagtggagtagtaccaatatagaaatatactactactggagtatattggtaaagccaagacctagggtagggagaagagtgcaacctagatagatctggacgaactctgcgctgtatgtaaataaaaaaaataatcggagaggagaggagaggagagcggggagtggagagggaatgggttaccaagatgaggtcgaagagggtggcctggtcgaccttgacgaagtcggcgtccagttcttgaggtcagcggaggaggttgagtcgtcggcggaggcgtgaacgtgcttgttgcagtactcgataaccttggagaggatcttggaattcacgttggggagggggatcccattgtcggcgcatttatcctcgatcatgtgccggatggtctgagactccatgcccaccgcctccacctcgaattcctctccatccgagctcttcagcgttatcatcttcttttcaccctccgccgccgccgccatagctgttgcttctgattcttgatctccgctgggaaggaggaggaaaccctagacgacgacgacggtggaccgagactatttatttatttattattattctctttggttggtcttccctctatctggatggtgggcttacatttggttggcttctctctctctctcacacacaccaacatgacttgctttttaaccttttttttagataactttctttttaggacctctttaaatcgtaggattacgaaacataggaacgaccgtttgtttcgaccgtataaaaaaatacaagaattacagaagagagaaagatttaaaggaaagtttccatgaggttttacctcatgttaaatttcctccaaaacttgtatggcatgagtattccataagatttcataggattcaattttattcattcctttgaaaaaggatcatctaggggaaaaatcccataggaatgaattcctccaaaaattactttaactttcctttgaatcaaagaggacatagcttctggaaactataaacgaaaataaatacactagtaggaatgtgttgcaagatactactgtagtagcaaatagagttgaaactgatttgaacatttcacatgccacatactggggaggtagttcttgcaaagtaaattatggcttttaagtagataagaaagaagagaacgaactgcaaatttgtgtggattagaaaggaaacattgggcttgtttgattcggaaccaatttttgccctaccaaaattttattagtgactaacattgggtactattggataaggcaataagatggtattaaaccaaacaagcccattatatgtgtataatagaactaattattaatgatgtagtacataagttaactattatacatatgaattgtctattagatttactataaatgattcggagctatataaatgatttggagctaaatgattcggagctatataaatgattcggagctaactgatgtcgtctttgagcaaaatctttgcttttcgctccttggggggggggggggggggggcaagacaataccgtctatgtactagcactacaccacatttattagtacaaaaacagtacgatattatcgatcacacatgtacacatgatggttaacaacataataatagcaaagtaataacattccagatacacagcaaagggtttcaccaacgaatcaatccttctttcgacaaatatgtaaactactattgccccttctttttttttctttatttacatgtacggcaaaggatagagctcctcttctcggtgctcgcgaggctgcccacgccacatatatggaacttgatttcactgcaaaaaccaatactacattatctatttatgtatcagcttatatatatgggagtatttaacatgagaaatactccagttcagcacctgtgtctgaagggagactctgtccttcaagctttgtccacagcggctggtagcctcaacctattatgtcacacgggcaacaaagaaactaattctggataaaattgatagggcattcaatggtgagccctgtatgttagttatcatcaactcatgatagatcaaatgatccacggccttctaggatcgcataaagcaatttcttgcgcatcacttcctgcaaaaagcaaaagcataaagccagttaagataattagcacatgtacaagagaaaacgaaaaattcaccatgtaccagagaaagaaaccgtacttttgtggagtatggaggcaatttaagataattagcacatgtcataacacttggcagatcatcatctgcagactctgtaactccagcgatatttgaagtattcaccgcacttgaggggtgctaatgatcaaaagcaacaacaaagttatatcacccaaaatgaggcgacaatattcatacgttataacatgctaataagatataccaagaatgttaccttcctaactatagtaagcttgggattaagggcagctaaaccaccaggcggaagccgaggagcaccagttacaaactggcagaatgcatgttgttgctctggggtgaattcagccatgatctcgagtagctacaaacatgtagagcaattaagtaactaaacttacagaaggccaattcagatattgaaatgcatatagcgcacttacatttacaattgcaggacttttagcagtatacccatgatcaaattttatattatccaccaatgaatcaggctgcagcacaggtttattcagtgaaatgtaacaaactaaaactgtgtgcgtgtgtgtgtgtgtgtgtgtgagagagagagagagagcattacctcccaaatttctcggcgaccacatattagatagtcaagctcttcaggtgaaaatattttcagggatgagatgtcaaagacctaaaacagaaaggtaaacatgaacaattacagtaaacaaaaaaaaacagctaataaaatgattacaagagagagaaaatgacgttgcacctggttaaatcctgatctaaatgcttcgacttgcctcattatccctgatttaactgtagcatccactaccaaagtaacatactcttccaagttgtaaatatttacctgcaaaacagagtaatactatttattaccacaaaaaggagcaaatgcagacactagtcactgggacaaacacaaaactaagatgggtttcatcacttacaattgtgttttcctcgccttctttaagaatataatcaggataacctggaagagtaaaatctaaacacaaatcttcgataggagtgccacggaaacgcaagtccgtgacttctagctgattcatgccataagtggattcaaggaacctcttccgttcaacaagaatttgcagttcttgcaatgtctttccgaattcagcatcaaatgagattatgtcaaataagtccagctcctggcacatacagttcatttgttcagactaacttcaataaaacaaatgtaacaaaaggaaaaactgatattaatccagtaagagtatatcacttacttgtccaagtataagcttataaagtgctgttgatagaggcaaatctaaaagtcttccatcttgcaaaacttttgccatcactcgcccaaccaagcggaaatgttcgatgaccttagaaaatctactgccttctgaagcatcaacggtaagtggccaaggccgaggaaacaatccaaagggagcttgtatcaagtggctgccattgtcaggtaaatctgagctgagttctttggctgccaagtcatcgtcgggacttgcgctcctatcaatttgcattcccgtatcagatggagaactagatctccataatccaaggcgaacactctggagttcatggcttaagagagtatagaactccaaagtgggcccaagccctgttccaacttcaccaaagtattctacctcaagaacagctctctgactggagaacatctccataactttagcagcagaatccagaatacggttacgggaaacacgaactttttgacgttgtagccttccaaatcggatctccctttcgccaccagcattttggttgtcaccctgttgttgctgaagtcgattcaaagcacgggacaacccaaatgctgtggagtaaaagtactgtctccttgtttcaaagggaaacaagaaagggcaggctttggtcatctggtaacaccaagaaggtaaactgccactacagagggcaagaacatcctgcatttgccgagcaagctttggtgtcaacttactattaacaaactcttctgacggtaccttggctccagttctatatagctcatccagtgtggtgatttttccctcagcaaaatcatcagaagcagcatgtactcttaaacgaggggacaactgattgagcccctctaatacacgcaatagtgctaaaatgttgtaagttgagtttgttctctctagatcacatgggagttctgcctgtaagatgctatcaaggagagaaacacctttcaattcagatatagatcttgaaggatctgattttgagttcaacgaggtggaaccaccttgggataccttctcagcctggctatcagccttctggtatgttatcgtgaacacatcaccccaaaatcgatttccatcatttgacaaatcagatccattaaacttctcatcatcatcctcttcaaacatcagctgacgttggagagcttgatacacagtcagatgtttgctgagctgcttccccccagccataaatatcagtttattgtgctcatttatgctacctccaagtgacaggccacgtcgatcgcgactacctctaaccccccgaccaccaacagaagccagcccagccattgtcgcagcaacaaatgacattgcacctcgtgaaccaaaggtatttggatctactcccctgctcatgatgttcctagtgctggaaccagatgagggctgcacttggctatcacttgctgaaccaatgttagagtcatcagtgtcacccaatttcacgtcatgcaccccatcttgaacacaaataggaagagagccatcttggagaacctgataaatagtagtacagttatttatttacagaccagagcaaataatatctgtaataatgaaaaactaagagctttattggcatatgatataatatgctgatcttacaggcaggcctatcaaataaaagcttacagcttatatatcaacaagcacaacatgttgtttgcataaaatcccattgtgacttgtgagccctagcataagcgcaccaccccacttcatttataatacatcttctctgtggaagaaaagcttatatttgaatatcaagccgaaaagactcgatagctggttagaccaaacttatgcttatcattggtgtatgccgaaacttaaataaggtcaagctagctctaaaatgccatgtgaacaaacttatatataaacctacaaattagtgcaggttgcaacaatacaaaattagaagcacaataaattttggaaagtggtaaacattacctcatgatcatcttcttcatcctctgacatgtcatcatcatcaatcattaaagcgtcatcaatttcaataggagatgtgtcaagctcctcatcctgcatgcacaaaaacacaaatttactacttgcattgctcccagtccatgcaagtcatatccaataattagcagatagtatgcatacacacagctagtttctcatataaaaatgcattggaacttcaagtcatcttttttaacaataattgtcctcatcagtaaaatataatataccttgtttcacatacaactctgttgggaatggcaatcggagactgaactctatgtcgaacatgggtatcagatacagaattgttatgatttgtttactctataaattaaatggccacatctagcgcaaactaatagctaggtggaaaaccacataggtttgctatgaaaccaacatgaaatattataaaagaaaaatgaaaatgtactccctccgtttcatattgtaagactttctagcattgttcacattcatatagatatgtctagatttattaacatctatatgaatgtgggcaatgctagaaagtcttacattgtgaaacggaggaagtagtttataaggcgctgaggtcaaatcttggtatacaaaaaggagattgtacattatctttaatttaatacttgttggacaattattatgtctatatgcctctcaacatagaattaacatgcactagaatcttgtatagagctaaataaaactgacaactgcattcgtaatctctattagaatttttcatgttcattcagagaaatgaaagaaatacctcagagctgctgtcaccatgtgctcgcttcatttccagatctttctctgaagcagcttttctgcgagtagcattccgtgtattaggtccttttggttcttctgagtttggttttgcaacagccttcccctttcccttggcagtgtttgtgctttcctcctgagaatccttcttagatgcaccactacttgcagcagatgattttgatcttgttgttggacgcctgccagatggagctggtgcagctgtggatgacgcaccagctgcggtgccaggtatgccagattcagaattatttcctgatggaactgtaggcttcgaagcagcctcactacgctgaactctgggccaaagaaactcttcaacagctgctagactcgcaaagggatcaataagcacaatatttgacgaataatcccgaagtgatttttcaccctgacctcgacaaaggcgcaacttgaagggctgagctagagcactcaaacctgaagtcaaacgggagcctccaatacctattctgctggactggctgagcacaacagggaagcgctccaatgaacacaaagcactttgcagtttttggaccaaaaaagccataggagtctcattcctttcatggtcaatagaaagggcaacagatataaaagacttgtatcgcctaagcgcctgctgacgaagctttggcaggtttgcctcagataccctctcctttccaaatgtcccacaggacaaatagtcaagcaatgctgcaacaactccgcttctaatgaactcaaatgttgatacgccgttagttttgctaagctcagtaagtatttgtgttattatcagctcaaattgtgcctccacatcatgtgagatgtcaaaatgagtggcacttaacgcttttgatttccctttggcttttgtcacgacattctcacttgcagaatttaactttgcacagagtgttctcagtttaagaagatcgtcagtaactccaagatctcttgattcatggtcagaagggaagtatttatctttgaacgactttgcacgatcactaactgcaaatcgaagactggtgttttgaacttctgtagagcatggtgttgagctggcaatcccaggattggaagtgtttgattcatctaatgagctgttttctgttggtgcagcagcaccacgccggcgctggcgtctagaatgcgagggcatcacagattcattgtctttatcatgtggcaatacctgagaaggcaccatatcagaggattctggacatataagcgactccacagcatgaacgacaccttccctcacaaacaacttagagaatgtctcaggaagtttttccatcataatttctgctatttgaagagcaggaatcaacacttgcggatctttccacgcaagaatgcctgctaggaagctgcaaatggaaattatgtagcttagcaaggatcagaaatgaaggtgtgtctacttgcacaatacaagaaataaaagcttccaatatacatatgccagtaaatcattaggttgtgccaaggagtgactggatcatttcagcagggctgtagcacattagttttccagttttccagtgattgataagcattagttttcagcagtcttattcttccaacataaatatgcttatcaataaaaacttccaacataaatacaagaaaagaataagactgaagcagaatcttgtattagcacctggatatgtttgttgtgccaaggagggactggatcatttcagcagagctgtagtacattagttttccaatgattgataagcatttgtggcgtatcggtgcatttacacttgagccatacacctgtccaagaacagatgccattaagtacagaaaccctgacatattcccaaaagtagtagtactccatctgccccaaaatatagcaacatctggctatgcacctggacaaagttgctctattttggaaggtagtagttatgttcactgacaagaaagaggatctgggcacaaacctgcgtcattatgggtaataagtccataccgaactgctttagaagctcagggtgctcacgtaatagtctctcatgtcctgacctttcattttctgttgaacttgtcccatcttgtttggtggaagctgatttctttgaagaagagcctttaacaagcacatggaagtatgctggtaaagaaatgattcccgaaggcaaatgtggaagcaaatcatcagcaaggctcactatctcaaacatctgcagaggtaagagtaaatatgtaaacatcacacataaagaaattaacaagcatgtatcaccccctcaatcaaacataggtgccaacaatcaacataagggtgcgtaagtgagataacaagcagcagctgctgataacatcatgcgttaacaatgctcacaaatgtcagatattttgaatctcagcaaatatgtttattggcatatgtatgatataagaaataagaccaaaaaaatgtaactcagcaattagttactactggtaagcgttggtagctttggatcaatcacacttcaaattagatactgagtattgtgttcctttatgtctccttaaaacactatcccaaagaaattaacttaatgcaggacgcgttatttgagaatagtgtctcaaggactgttgtacagcatttgaaacaatggcactgaacatgaacagagatccaccgataacatgttccctttctgcgtggttcattaaaacgtcaacagactagtttttgtttactaaataacagtcctaccttcaatcctcaagaatattaccatagggaactgcccactggtatggaaaattgtacatgtggcataggcgcatagccttaacttttaggaagttgtggtaagccatggagataggcgcagaagacacaagtttagaaaacatggtctgctaaagcaagtttcagaaatacataagaactgagtctcagctacccgcatgtcacttcatctgagatagatgataaaaatgccataaagcttcagattaagtaaattcagtgacacaggcaatcacctgttcagcaggccttgacaaagctggggagactgatgctccagcaaccaaaccagaacctgaaagaatatctttaagagtaccactgattccaagaagaagaagtgttttggctgctaaaagcgacccactcgcacatgttgagagaagacgaattaatccctgaaaaaagttccagtctatccttagcaagagtacagaaaagataggaaacaactcgaaagaatgacagaacatatttgcgtgtaccgtatatgttgatgtactcaacgaggcctggcctgcggagttgctgattgataccaggctagcagactgagcaaccaacccatgattgcacaaatcatccaatttctctggataagaagcaaaagcctctgcaacgcgtgtcaaacaaacagaagcatgttcgagcacctggaatgagcataaacagaaagttaaaaccgcatgttataaaggtgaagccggatcaccaatgcgatgtttggaaatgaaaaataccttagaatcatggtggttcaagagattcgtgagcaacggaacagcttccatgacaaactcggacgcatcagatggcagcttcctgcatatattagcagcagtagacaacgcaactctctagaagcatgtccaagaggaaacagatagtaagttaatagagcatgcagaaccagaggaaattaaatttaagtgggtttgaagatttgagatatccggagtggtgaattaattaatagcatacctgaacaccagtagagaagaagtccagatatgacaggacagccattagcgcaccagctcgtaaacaggcagttggatgctcctgggagatcttcttgagggcttgtagcgactaagaacatcaagaagtggatgttagcatctcggtaaacacatgcttgaaggggcaaagaacaggtgttccgagtgaatctagctagcctacctcatgacggcaaatggttagattcatcatttatttatgacaccacagcttatagttatgcactttaaactaatcatatgaataattttatttattcatcagtggtgtagttattcagttgggtatggaatataacgagacgacctaataaccacatgagtagagttcatgcatcaatggtactagagcgtatagctatactggacctatcaaagacaatggctactgagtcgtcgttgtggtggcataacaacagcagagcaagatgagagtattcaggtaaaaatattcaactaggtcatatgaacaattttattaattcagtggtgtacatacacgagtagatgaatgaatcgatggtagcagaaaagcataacaaagcaataataataatatgaagaatgagatgagagtaatgagtaatgagacaaggggcggggtgagtatacctgctcggcgaggtccatgtactcgatggtgagcaggcgagcacagaaacagggtatagccccatagtgcacgacggcagagcaagaggaggggaggacgtcgacgagattggcgagggcacgggcggcgagcagcatgacatcggggctggcgccgcctgcaccatcctccccggggccgagaaggccaacgaggatgggcacgaaggcatcgacggggaaggcagcgagcgactcctcggtgccgatggagagcatctcgcagagctgcatgagagactggagctggcgcgactcgtcgccatcggactggaggccggagaggatccgcttgagctgggcggaggtggaggaggaggaggcggcggcggcggaggaggggaggaggtcgtcgaggccggcgccgagcctgcggaggaggccctggagggcggtgctggcggaggtgaaggagtgcgggaagggggcgacggcgtcgtcgtcgtcgggggcggagggaggggaggggtcggaggaggggtcggggtccttgcccttgtcggaggcggaggcgcgagcccggcggcgggaggaaggggaggggtccatcgcaggtgcaggcgcaggcgcaggagggggagcggcggcggaggaggaggaggcagcggaggagcggcgggtgcgcttgggagcagaggctgaggaggaggaggaggcggctgctgctgcggctgcggcggcggcgcgcttgcggctgcgcgtttccatacaagcggtgacgggcgggggggagggggtggctcgcagccgtgcctaggcggcgaccggcggcgggcgcatcgatcgatcgatcggagctcgactcgatctgcggcggatcggattcgctcgccggagaggagaggatggatcgaggggggcgagggatttggggattttggggcttaagacggtgcggtggacgtggcttggctttggttccccccctcctatagccgctcttcaaccaaacggaatggaatgcttctcctaaaatcaacctcccattttatttttattttacttaattttattataacaagactacatattttttaactaaattatcacaaactgtagatataataagtttatatattggaaaacttccaattttatgcttgagttatcacaaaactacaagttttaggttatgggagggatcacaatcttaacaaaattcaaacatcttgagctagctcaaacggtgcatctcaaacggatttcttcaaaaattgtagaatatcattcaacatatatcaaaatccgttcataactaattaaaaatcaacgtccagacatggctcaaaacttgcactagccaatcaagattgcaaataatgtttcagtcccatatacaacaatatctaataaactaggtcttacatatttatatgtatcccacgtaagaagagttttatttttagcggtaaatatctatgttcatgatcttagaaagcgtttctaggtacattcaaataagtatggacattttaccatatcaaagcataggtataagtatggacattttacccatagcaaagcatgggtattttgctagtattgtaacaaagataattcactgttgccatctctatctatacttatagggtcctcctagcgttgagggcaatattttttttattgaaaattgaggacaatatttagtaagacgtttaaaactttgatatcaaatacttgttattccattacaaatgtcttgaaaatataacttagcctcaatattccacagcaacaatttgtaaaatcttaccatctgtacagtattatgacaacatgtatacttgggataacttgcaaggttaacttgcaacccctaccagctcgagtctttggttattatttacgaatgttttcataacatgaaaacggttacccatccccttaaaatctttgttgacctatattattattaccattctgaagtataaaaccaaccaagggattccactgtctaacttatcttccctgggttattaaggttaggagcactataagcaaggtataccagtttataaagcgaagtaaggattaaacagatgtacaatgacgagaattgcctccctatttacatttgaactgcattgcgcatacgcaacgagtgcatatttacatagaaatgtatattcgcatgagcacaggcgcatgtacccacacgtcaaaaggtcgataaaagatgaacaagcaggtactgcaaaagacaaccgtggaagtagtagtacgtgattggtaccgcaaaatgagtgaacatcctacgaaataacatcttccgatcgaccttgtaaacaagaaagaaagaaagtagagaggcagctcaggacacctccacgaccaaaagagaagaaagaagctactactgggctcgtccacgggcacggggtgggtggtctgtcaacagtcgaataagcttgtcggatctccccattgcatctcttgacgatttcactttttcttcctgcaccaaccacgcctacactttgtcagcagctaatccaaatcaaaccaattgtgcatcaaacagacagtggttttgccgctagctataaataatgtcatgaatcagcgcttaacaagccatctgcatcagcgatcaaccagagcttagatttagccgccccattattgtgaaacacttggatgtggttccaattgttgctgaggtttcaaagagacgtacctttctggtatccacaaatatatcaggacctgtgaattctttgagcatcatagctgacacaggctgcaatctcctggtcgaggaaatgaaaggtaaacttcaattccatgacaagcatgcttttttttgcgggacacaaaaagcaagactcttaagcagtaattatgcaagaaaaaacatttctgaagtactcaccttctagtgttctttctattgcaaggcttagaagcagagagatcctctattttatctgtcagtttttcagcctgattgtccttggttggagacttcgaacgataaccataacaaaatatgactattagaaagggcgacaataaaaagaaactagcctaacagagcatgtcatttttctttttacttcttaactaacaatattccagtagaatatctccaagtgtttatagacttagcattatatttttcatcataatgcaacaagcaaagaagtgccatccgccccagactagacagtaatgatcttactattggagctttccttggggaagattttccatttagcgtacatggatacatgcctccatgatcatccactacatgtggaggttgagcacagcctacaaaaattgtgttccattgataatgtaatacaacatttcagaaggatatagacaatcatatacaacatgcccacaccaaattaagcacgaccaatgcttttgttttatgagatattacacattacataccatattccacaatggttatttctactgttggcttgcatctttctgactgaggatcctgctgaagagcaccctaaagaaaaggcacaaacatatgtcttagactttccaacaaggcaacaacgatttagcatagaaagaagaagcgccacttgcatgcaatcatatttcatcctgagaaatagattaaaagaataagaatagcagctaaccttgattatgtaaggaaatattttcagtgcacaaagggattatggacagtgttctacaacttgactaggatattattgtgttatttttggaactttgaaggagctcagtaccacagtgaaaatagaatatgcattacgctccacatccccatacttccatagctctaaagaatcaatctcttctttcttcccaagagctctcttcccagcctagcaagaaacatccccttctaaacccccaatggcagccatcaccagttcactaccctccccaaactcccataatagaaaaacacaacgaacaaatcaaaggtggaaaactcaaatgtacaaatggataactgtttgatgcaacaaactgcttgattgtgctaagaacaatacaaagatacgtacaaagatacaaaaagaattaaaatattaaattgttccataccatcccttgcaactgactggagctaacatgtaatgagccagagttcacttcttgggaacaacttggagtactatgatgtttcacccctgtcaaaagatccaacaaaattgtgataaaatggtgcatcatgagcaaaatattgcaacatggaacttgttaacctcttgtgtgaacattctgttgaatcccctccgttgttatattgtgtatctcttccctttcttcttcactttgctctatgggagatttcttgctagcaccaataaattgtggagacaggtttgcgctttcattctgtaggcatgtatctgcacaagtgaccttttgtgtcagttgaccttattgtctacacaatatttttatttttagaagtcacacagaaaggacttcccttgcaaaaatggtaccacgatctttaaatggaactctaatttccacatcagaagaaatatgtttcctaattttattctattgtgtgagtgttaccatgttaaattattcagcgggaagaaaaacatagaaactttaagaacctgtaaagctttgatcagatggatgatccaaactactggatgaatgtgtgacaccaccaccatcagagcaactttcagacctatccaacttcttatcaagcacctgtaccactatctaaaaaaagagaaaagtaagatatggtttatccacttgtacagtcaagatagattatactctcttttttcaagtgttccagtaaacatctctaaaaaaccttaataagagactgagtggtacttgaaaatccaaggtaaaacaagattcttctacgcatgtgtgagaaagagggagagagatagagtacatattaccccaatgttttctttttccacatcatgctcaggaataaaagcatcggaactacttgctttctctggctaaaagaacaggatgatggtccatatgtcagtaaaagatgcagcaatgttcctcgagtatcaacatcatgacatctttttgaaaaagaactacatgagcatttctccatgaggatccaaaggtccaaaccagtaagtatcataccttacaatctccggagcacaattcttcttccgctatcagcttaataatagaagtatcacaaacatcagatccccctgtccctgttatagaaaaatggattctcaggcctatgagaaccatctgatgatattgtcctgaacatgtacaccatggaaatgtaacctgtcttgtcatcataatctgaagacctttcagggccatgacctgtagattcttctgagacctcttctactgctaactgtaggaaaaaagaagttcgcttagtgctatgctgtataacatgcaaaagaatattatcaagaaagctccaacctcatttatatctgcatttgaactttgcatataacatgccctaaaaattaagaaactgcatcttattgaatatagactattggcgtgcaggcataaaaggggagatattttgcttcccattaggcaagtagtacataagaaaaaaaatggtgcactatgtaaaaaacaatccaaagggcagaagatcgtaactatcaaaggaagtgaagggttaggaacaggctgctgttcgatgcaaccagagcatgagattttatgacattgaagttttaagcatgctcaactgcgccaggtatcaactcattacagtaagtttaatctgacgtaaacattgtgacagcccttctaaagcctaacagcatatctacagagtttgatggaataaaagatacaaggagtgttaagcactctgtttgcttgtagagctttagatccaagacatacttattcaaacattactttagttaaaaggcactcaatgaaaatctaagtaaaaaaccaaatgtgaggttttcctgtttgaagtttctttaacttacagatttgtttagagcagagtcaatagatacaagatcagtttgacttgatagagaaacaaaactttgagccacttgaccagaagacacatcattgttttgctcaacaaaggtatcttcaacagctggaaatttcttgcatgaacaacttagaaccttcaacttcttctccagctccataattttgatgtctttagatctaagcaattctcttgtgctctcaacagcattctcagactcctacaggcaaacatgtgaattaaaaaaggacaaaaaaatctatggtgaatttattgatctatatatcccatacaatataaacctactaagtgaaattatggcatttctacttttctcacaaaagcacatcatcataattttctagcattttgataattgatctagggtagtagggtgtagattgtaccacaaagccaagccgtctagctataattcaaatccacctcggacctcatgttaaccattttgtcacgctaatttcacatggcgacacacaaggtttatatctagtttcattaacaactaaaaacagtgaaatttcaagagcactagatatacaacaataaatcccacttcaagcatgttatgttccttacttgacttcactacccatccttagaacttaccacattgaagacagacatcaatattccacattctggtcaattaaacagagataagcaatataaaggcaggaaattaccaaaagtttttgtttatactgctttaaaacagtccataaagccctggcaaagtttgtcattatttcttcatttctcgaaactcttcgcaattctgaattaagaagcttgtactgtgactcatctgcgcaaatatatgaaataaacagtatgaggtgaatgttgttattctcttactttattacactgaagataagagaaatatttattacgagttatgcaaagcaaagggtcagaactatgactacagacaagtaagagtcaataatagtactgactactgagaccgaaaatgaactgtgccaaaaaaaaacatgtgatattgaaacaaatgaaatattaatataggtgaatagaacctttttcagaaattgtaacaccatcatccttatcaatgtcatcctttcctgcgacctgcataaatatagcatagattatagtgccttctgagttctgactaagatatgaaataactatagcagacataattatataagaacttgtttgagggaaatatggatcagaacatgatgaagtttgagtgatgtgagggcagtcaagactcaagactatgtggtcctttagtacttatggtacaggattgtaattaaacactaaaaattgggtcaatgataaatcaggacttcaaggttttaaattgatcagcttgtttgaagcactatggagaattaataagttagatgggccaaaatgaacaagtggaaagcttagtaaaaattacatccatactgcaaaaacttcaaccttatgaatcttcctctttttcgtgttctcttggcaaatcagggaagcactgcttctcttttgggaaaccaatccagaagagtcctcaaggttggtatacctgaaagatagcaaaataaaaccagggcccctttgaaacacaggataggaataacacaggaataggaaaaacgcaagaattgaagttgcatgtttctccaatcctacaggaatggaaaacacaggaaagatgaagatggagccctttgatagcatcacaggaaactaacaaagcaaaggaaagtttccaagaggttggacctcttgcttattttcctatgaaattgaaccataggaatgcaatcctatggaaaatgtcctatcctttcctacgaatcaaagggctccataggaaaaattccttaggaaattgaaacctggcaatattttctgatgttggatatcaaatagaaaataaataatgaataccttcaaaagaacatgtataaatgaagtacttgctactgagattttgttttagtacaaacacattattgaaaagatgtggattaaattagtcatatatcgcttccctcaatgcatttcctccattctagggttacgtcccatgatctaaagttgtcccatgatctaaagttcccaatagctgatatcttaaaatatgaccctttcaactagaaatgctcaccctaacagtattggaaaacaaacagaggaaacaccaccaagaagctttgtgtaatttattaggcaatttttacatgcaccatataatttcagtatttcacttgcaattccttttgcattttccagcattcataccataggtcatatgtagagcaaatgtaaaattgtttcctacttccctaaagtcaagattatgtatgtattcaagtttatctcccttcatgtgtctaattcctcaaaataatgagtaattgctgttatgaccaacataacaaatagagaaataggcttagagcggttttttaaaaagaatcaactgcactagaatcctatctggttaaataagatgcagcttacaaaatattttttactctcataagacaattctgtcaatgattgtaaggggagtactttattttcatgtacggagatgcttgtcttagcaaaaaagatgtatccaaataatcatcatctcctggtttcacattcaaaatctgaaaaataagaaaaatcacgattaaaaaaaaaactcaacacatagaccacacagcaaaagtgataaataaataacatagcaggctgcaaatgtcattgcagcacataaatgagcataggcactgttatggatgcagccaaccatccttacattaggaggcactacgaataatcacaaataagtgctcgcttcaatttggatctatcttattatgttatcttttgagtgatgaacttgttccttcaaagatagtacttcctctacacaaaaataagtggtgttctaggatcaaacttttgtactttcactaaccatacccccaaccaccaccaccacaaaaaaaaggagggtaaactcgaattttttagatgtcagtaaaccaacatttccttgatttgataaatatatcgctacaaaatttgggatcaaagagctttgggaactgtgtcaggtccaatgcattgcttaatttgtgacggataaagtataaagcacatcaaaacattttttaaaaaatgtagcctataagtgaaggtgaagcgcatcatttcaggagatttcaataagaatggacaattattttaggtgcaaataacataccagagtcattttcttccttccttccaggtagtctctcaagtaccttgtcaactatcaaaaatcaaaattacaaaagatttagaagaaataaaaataaaattccgtttcaaattaatcttcaattgctacaactggtgaatcataaaatgttgtttgaactttaaacttattgcataaaaaagttttgagagcagaaaaataagtcatcaggaatagaatgtgaaaattagtttttgcatttcatcaacaaactagctcactatacatggaaccaatgtcattagttatataacaaaatatagaaaatcaattgatgtgagaccaccgaaaaaagtgctaagcaagatttatcaattgtaaattgccttgttgacctttagatctgttcttcagattcctcactacaaatagaggatctatgtaaaacatcatttgatgaccataattagggaaagaaatggtgattacacaccaaagggcaaaaaaggatagaaagaggcaagattcaaatccatgttttgcttgtctcaaaagaatatgttgtgtcagcagacataccattgagttcttgaagtgcttctccaagggtttcttcttgtttttctgatgctctaacaaagactgcagttccaaaagatatttaaaaaagcatgcattagcaagcatgacttactgatctgagtatgcaaaacataacttagtatttctgcaaccacctccagatggaaaaaggagctactaaagaaaatccatttggccataccctcaaacagagaccaaaaaccatggatgtattgttgatgaaattactctctagcaatcgtgtaccctgtaaatgaaagagtaagagaaatgtacacaaaagatggcatcccataaaagaaaaggtgttgtgcatgcttcatatgttctatctactaatctatattatagggggagggaccattgatcaagaaacaaacttgatttccagttctcctttcccgctctgcccccgcaaggtctgctatggtcaggacagcattattaagcgaattctcactttctgcatcagagcttttatgaacagcacgtatagtgataatgcactgcgatcgactgcaagacaacataagcgtaaattagtagatcaaaaattagaacaaatgctcaaaatagaaagcaaagaactatatggtagaaagaaaaaggaaagaaaacacagcatctctaccatcattaggaaaagaaaaccttgaaagtaaaatagatatatccaggataaagttttttggttagtgaagatcatatgaagaaatttataaggaaaacatgccttgacttgctgttagcatttgttgcagctgtggtacgcttcagcatcccagaaaaaagtaaggcctcagcatccgcaaaattttcaacggatacctgcagaacaaatgaacttattgcatggtaccaagcacattggtatcagcactaatgtagttcaaatggaatgggccttccccctgactatggtttgtgctccggaatcacagaaagcagagtaaactcctgacatgagttggattaggaagttttcatccaatcggaataattaacaggaagtcacagccagaccatttgaaatgaccgaaaagatgaggtgcacatcctaggttaatgtttccaacatacctctttaagacctttaattgttgactgctggagaacaaggtcggtcgcatcagacagtaggtcaagaatccgctctccttttccctcagaaagtatctcgaacattgagaagcaaaatgatctgtagttatgagaagagatatgatatggaatttaaaaggcttccgtcctccatggtagtgttagaatttagatatgaacatggttaagagaaatattaaaatgatgaaagcatttgttattggaattatgttgaatgacaatgtaggttttggcttaaaaagagtgtaataccgtagtttgctgaagggttcatgtgttgttggagagaagatgcggcgtagcgtgagtggtacaagtccaggattccttggggagccaaagacagtatgggtctttccagagccagtgggacccattgcaaccagaaggccactctttcctcccaacaacaagtcatccaccagcggattcatcacttgactaaatacatcatgctgcatatattggagtactagatatatagtagaagatcatctacaaacttaacacgatggatggatgcagtcagaacgcaacgaaaacctcacctgtgaggaatcgggtgagaagacggaggagaagccgtcgaagacctcggtgcggccgcgcttggggtcgaggagcttggaatgcgggacggtgagcgcgacggagttgggggagttggcgacgaggcacacttgcttgggattagttggggacttggccttgcccttgcgctccgggagcgggagggggcggatgcggaggaacaccttgagccgctccgccgcctcctcgagcaagcgagagatctgggagggtttggaattggggagaggggtggggggaggcctcgcgctgcgtggagggttccgccggagggtgctcggagcaggcggagaagccgccgcgccagcgccggcgccggtgatggggggctccttcaaattcatctcgactttggggtttgggggtttggtgctcagcctcaccattccattttgaagccaactccctccgctcaaactacacttttcttttgtttcgggggagtctgagggaagaaatgaaagtttaaaatatttgaacattttttatctcggtttgattggaggatttgagaattagggttggtttggttggtgttctatataggcattaccaaattttttttaatgccaaatttttgtaagttttggtatgactaattttagtaaggcaaagttgtgtttggattgaagccaaaatagcctaagttcactattggaatgcccattttcttagacatgctaaaattcggtttcaaaccaaatagacactaaacactattaaaattgtgttgacgtaaaacacgaggactgggagatctgcttagctcctgtgcaggtccaaaggttggtgatatgagggcgtgccagttagtttgatcctgcaactgacaagatatgcaaatagtagatcaaaacagccgatcggctgacaagccgatggagtagttctagccgatagccgataatagccgatgccaataccagccgatagcgatagggtttaagcaatcggctatatgtccaatgtagatgatgatataaaggcaatcggctgatgatggtgtaataaaataacaatataatccagtataaattaatcggtaaataatgatatgataaataagcatcgatccgaaagttaaagcacacatcggctggaggtacgatgtcatgaaatccacaaagattagattaaacagtgaaacctttgttgtcatctgctaaatccaacttatatatatatatatatatatatatatatatatatatgcaatccttatgagccgatgcaacgtccagataactcaccggctgaaaccccgatgaaacccttattggcattcaagaagcaggctagagattatggttctaagcacgacttagtagatcaaacttaactgatacagcactaagtatgaaaaagaaacataatatctagacaatcaagccgttgactgagttttcagggtggtagatgtataagttaatctaatctagcatgacgatttagccgataccggcataaaccctaaagcgagaagcagccgatagagctaaattgagatgctaagactagattaacatagacatatgataaatagccaggcaaatatattatccaaaccagagtaatccaagaggtcgaatgtaatgatgcagccttgaacgacgccgacgtagacgatacaattgcctggaccggtggaacattggacttatcccttcgccggagatcgaagacgatgcagccccacgtcgggtgccaagttccaccggaacgtaaaaataaaagtaaagcaaaagggtggcgatgcgccgaaattgtattgaacgtgtgtatagattacataggccctgggtgtacatatttatacccatgtgttgatacaagtccttgtcggacaagaaagaaacttttctaaagataaaaggaaaagataaagtccttataggacactaaacacactttcctaaaggaaactaacaaactattcctaattaatagataacttgccatgccgtctcttctggataagcttcctttagtagatcaatttccttaactgaatatagcaagaatccgacaactgacgacttgacaactctcatcgactaatctcaggacttcaaagccgatgctgactctaagccgatgactactccggacttaccaaatttcactgttaacaaattgttatatattggtgagcctaatgcatacatgaacatggtgccgttaatggatatgggcttctcagtgtgaatgttggtacggttgagatcatctggatcaaggccagcaaagcgagatacagtgaccttgtattgttgtccttgagtcatccacttcaattgaagttctccacttccagcctgcccaaagtatatagtgcgcatcgaactgccccatcacgtcctcacaccaaaatacacccaagacttaaactgtggccaagatccttgttgatacaaactagcttaaataacatcattggaggcataagtttgctccttgttcatatactcccagtcccacttcatacttaatttcttttaatatatttacgtgcaattattttacgcgtttgccaaaaacgtcaacccaattcataggattcgatcttgccataaacatgaagttgtaccaatcaatttggaaatcatgcggaagcgaggatctttggactcgtgaggaagcagagtgtcttggtctattttgcgtacatgtacattcaatagtattacacttagggataaaatcttaaccactaatttattatattttagccgtaaaaaaaaatctgatagttttaagattgtaattatgtcagaattttatcttctttttactctatgtataatgaattttaaaatgcaactttgcacgtaaatgtaatactattggaagtacatgtgtgatttttttaagaattttttatgataatttttagttggtgtacacggtgggtacacacgagggtctgtgtgcataggatacgctcccgtaaactgcggacatcacttatgtgtgtgtgtgtttgtgtgacctggcctttgtatgaatggaagtgatatccgcagtttataatttgtatgtatatatagcactggtattatggctgaagatcgagtagagaagaagaaaaaaaagctagtagaggttaatactagtagtagtatatagttaaaaggaggacatgcaaaggccattttggtgttaaataatggagtgtaagtaaataaaaaggaagggggggcggcaggcttcacacaaagctggcgcgcacacagacgcatagcatatataggatgatgcgtgtgttgtattccatcatcatcaggtagcgcgcgcggatagatcatatctagcgtggacgatggcgaggcatcggtggtatgtgcaggcggtggcgctgctggtggtgctgaaggcggcggcagggtctgcggcgccgccgacgacgacgaggagcaggagcagcagcacggtggtggccgggatggtgttctgcgaccagtgcaaggacggcgccagaggcctcttcgactacccgctctacggttggattgcttttgcatttgcatataaagatactacaatttgattgcaataatccatgatgatcgatgatcatgggggcggcggcgtgcttgaggcttgagcaagctacctgtccgtcatctactctactgtgtgcagtgcatgctattctccttgcctacctaacctgatcaattagtactttacttcctttattattctttccttcagaaatttgtggttaatttggatatgctgtaaaatggaaggaatgcatttgtggtgggtgcaggtgcgcgggtggcgatcgagtgcggcggaggggagagcccggtgacggtgcgggagtgcaacaccaactggttcgggggattctccgtccgcatggagggcacgcccgagatgaaccgctgcacagcgcgcgtcgtccaggccaccggccactgcggcgccgccatccccaccgcccctcgcgacctcaccctcgccttccgcatgctcggcctcgccctctacaccgtccccccactcctctcccagccgctccgtcccatggacttctgcccatctccattaacatctccatctcctcccgccctcgcgctcgccccctctccgattccgactccaatcatcgcgccgccccccgtgtcctcgccggctccccctctcccgcccctctggcgccgcaggcctcgccgcctgccgcccatctggcgcccgaccccaccctcgctacccgttgacaccatgccgccgccgccgccgccaccgccaccgcagccgcagggctccgcctgcaccttcgagtacgtatctatctactagtccttccttaataatttgaacaacatatagatgattaatgaaatgaaatggatcgtcagcaagtgggcggacgttggattgcacgggtgcaactggaaggtggtgacgcccaacacgacggtggccatggcgttcggccccgccgcggcgcagaggtacggccccgacatgacgctgcgggaggcgctggacgggaggggagacatgtaccggacgctgctgcgggaggccacggcggcgctcctcaatgcctactacaaccccagtggctccggcttcctgtaccccaccaccgccagcgtcatcgaccacatcaacgccgccctcctcacccccacgctccacaagcttctcctcgagggtgcgcgcttccgccgcgccaactccgactccaacctgccctgccacctcaccccctgcaactaattactactcctgcttgcttactcgatcgctaatgcactcgtttttcattttattactcgctacgctaatgtattactagtgtctcgactcaatacttaattggtggatggattttaatactacactactactactggagtactatagtacaatcgattcaattttattattacttaattaactaatagtagcagaacatgcataccgtatgtactggaagcatcatcccttgaccagccaatttattatactccactcgcgcggtcaaaccaagtcaatacgacaaaagcagagcagagcagaggaaacgtttgctgttcaaactaatttaaacagggagctactactacagactactcctccactagaagtagaggaattaccactagtagtagagtagtacattccaattccaattacttgagtagatccttggattattcattccatcaagggttggattcaaaaactagacatccaaattcattcattaattagaggtaggtggagtagtaagtaaaagaagaaaaaaaacgaaaataaaagaaagaattaggagcagattgggcaaagcacgaggccgttctcgttacactcgccgcagcgcaccaccaccaccgcccgcgtcttgttgctccttgcagccgccgccgccggcaccggcgtggggagggagaagcagagcttgcggctgccgttgcagtcgaagcagggcaggaatcgcatgccgccgcatccgtcgcagcagccaccacctgggcgcgccctcggcaggccctccagcagcgccgcaagcttgccctcctcctccaggcgcgccacctccgcggcgccgccgacgtggttgccccggacgaacagccgtggcaccaggggcgcgcggtcgtggtggtcgagggagatgcggtggcgcaactcctcccggaagccgcggtccatggagatgtcgcgctcccggaaggcgacgccgtgcgagtggagcgcggcgcggacggcgttgcaggcctcgaaggtggcgcgcacgccgcgaagcgtggtggtgtagagcagaaccccagcaggaggagcaggaggaggagagtggtgcgtgggcctccgtggtttctgtggggtggcggggtcgaggagaccggccatgagctcccacgagttgatgacctccgcctcgccctgcttcttcagatgcttctccggcggggctgcacatggtgggttggtggtggtggtgggtcggggaggcggcgtgggcggaggaggaatcctagtaggggattgggattgggattgggattgagctgatgatactagaatgttgtcgaggatgccgtaggtggaggaggtgagggagacgatgtgggaggcggagacgccgatgatgcgccggcggcggtcatcgtcgtcgtcgtcgtccacgaacgcggaggcagcgcaacccatggtattggtattggtatggtaggaaggaaggattcgattcgaggatgattaaggagaaaggagagtgaagaagaaaggaatgcattcaaatttcaaaacttgaaaccgccatgccattggatggcactgtactgtactactcctacattactctattgggcctgcctctctggtcgttgggcttggcctactcctgcatcaccatgtatgggcctaacttaccatgctttaagatggtaccaccagttaccagaagtaatcatttagatcctctttattttaggcttttaaccgatcttttagcttactagacaaaaaaaaaaaccgtgcgttacaacggaaataaaacacgagaacattaagaaaaagttgagaaagatttacattatgtaattaattaaaatacaaatttcaccatccttcatataaagaagatatatttatattcctatttttatttcattcccattacatatgaaatcgcaattatacatgtatacgatgttgaagaaaataaagtatcatgaaaatcaaggtaaatatgggtaataaaattttccaaatattggaactaatttttattaaattctccatgattaattacattatctgattttatttttcggaattttctgagctccattactaattttaaccatacagacatcatttcagtttttatttaaatgaaaatctaaatgaaaaccatactttctctctgggccattttcagcccatttatttcctcagcctgtagccgagccggccctttttccttcggaaaaagtacatccaagatccctcaacttgtcatcaagatacaaaatcgtcccccaattgcaaaaccagataccgggcatccctcgagtaacaaaatcgttcgctttaggtccctcgtagttttaaccccagttttgtccgacatggtggccgagtctgcgtgggacccacgtgagccccacatgttaggatgccacgtcatctatcccttcctcttctatcagttttctcctcatctggtaggcaggctagccggcggttggggaggaagtcgacggggcgagccgggagaagaggaggttcggcggcggtggccagcgatcttcgatgcagcagcggcgacgaccacgcaggagcaggccggtcggcggagcgggaaggcgacgggcggagcggcggcggcagctgcgcctgccgcaccggcgtgccggaggaccgggcaagcagggggcagagctggcgacggcgcgggccggagcgaccgaccggcggagcagcccgcgccgtcgccggcgggcggtgggcaggcgtgctgcaggagaggaaggggctgcggcggcaggtagacgccgtcgtcgccacgttcaagctcggcagccgccgttgtactgctcgacggcggtggccagcaactacaccaccgacagccagtactcgctcaacctcaaccagctcctcgcactgaaaaatggtcaatgtgtggttaacgtgtggctttaactttgcagtccctatagatgaaaactgaatgtgatttggttttgtgttggccatctgaacttgtgaattgattctgacattggcaccatgtatgcaaatgcacaatactcggaggctgagagcaacgatggcttctacaaagcttcgctcggcacggcgcccgacgaggccttcgccctcgccatgtgctacgccgaccggaattgaacggaatgcgagagctgcctacgcgcggtggccatcgggatggcctccctctgcccgcggagccgtaatctaatacggactagtagtctcttgcctcattacacgtaaggggaaaaaagaactggtccaagctagtttttttacttaacagtgtaaaagtgtcttatgacttttcaaaaaacaacaaaaaaatcagcttattttgtttacttaatagtgtaaaaatgtcttatgacttttaaaaaaccaaaaaaaagcaacttatttgagtccaataaagagggtcccaaatccagctattcaattgctaggggtcaaactggactttttcctatcaatttattcacgatccatccatccatccggcccattaatttccttcccattaaggcaaagtgatgattactactccccatctcaaaataaatcgatttaatacttagatatgattaatattttctagtataaaaaatttagatataagcatatctaaatacgttgtatattagaaaatatgtcatctaatattagattggtttatttaagacagagagataagaagaagtaaagtactccatccgtattttaatgtatgacgttgttgactttttgatcaacgtttgaccattcgtattattcaaaaactttatgtaattattgtgacttaatttatcatcaaatgttctttaagcatgacataatattttcatatttgcaaaaaaaattgaataagacgaatggttaaacgttactccctccgtcccataatataagagattttgagttgttgctttcactgtttgacaactcgtcttattaaaaaatttgtgcaaatataaaaaacgaaaagttgtgtttaaagtactttagataataaagtaagtaaaaaaaataaataataattccaaaattttttgaataagacgagtggttaaatagtataagtaaaaactcaaaggagtagtaaaaatatcaacggcgccattcagagggagtagcagatattattgatacgatgaaacgatggatggatggatgcatgcctgccttacctttaatttttgcatcatcccattgattgattcgctgattggctcacccggccttccatgatcgagtagtaaattgatccatgattgcagcccaagaaagcgatctatccacagtacgcaccaaacccaacccccaccaggaggttatgactccgttcaggttcaggtgtgctacctatctgacgagaagcgcaccatgcaggcagctactcctactacttttccttgttcacatcatccatccatccatgttcaacctaagtggagtaataactatacttgcattaacacaaatgaactgctatagcttcatcgtgtaacacatatcacactccaaccaatcatacatgcaacttaaaaaaaaaatcgatattctaatgcccatgaatattacttatacgcaagtgggttttcaatggaaatttagtgagataagtgatgtgccgctaatttttgtctcttttaaacatgtgttagagggtatattcgtgggtgtgtgaatgtggtattgtgtgtatggtggtgtgtgcgcacgtccgccatgtaattgaaaaaaagaagatatatgcaactcccataaaaatatcgatatatcaatggaacacttcacattttttagattatttgttagttaactgatattcccgtaaaaacaatcattttttaacagatatgcagggcgatatcttactttgggctagagggaggctcattgccttcctcctcctccggtccctggcctattcttctttctctacctcatcttcctcttccctctctccttgttctctatatatggtgatattcagcgtgggtatgcatcggaccctggatctgccccggactacagtcaatgcacatgttggatacgacgatatagccatcatatccaacttaaagtttattttgcttttctctttaattaatttggtgcgacaacgacattacactaagtctgaaattggtggattttgccggtctcactacctttctccctaccggtatgtatgtgtgcactactattaccacacaatataatgtacgatcattaattatttgtaactatatatgcaacagatagatgctgatgagatgcaggtctctttcgtgcatgtcgtctaaagtgattacaagtaaagaaagaatctctaagtggatactatgaaatgtctatatagtagggtgaaatggatcaaattaatcccccggcctctagctactaaggctacaggtgcagtgtttcagagcaaggttaatagtatagcccactactaacttcaattcatctatagctaatttatacaatagttgattactatactataaatatatggtcccacctgtcatacacacactgcgttttggagttcgtgctgcaactggctacaaatctgtagcctgctgctcttctctctcatcttttatcttattaaaatatgtttatagctggctaatagtctgctattgtacctgctctcacaggttccattaatagccaattgcaaggtaattatcattagtctagatgagctgcataactagcctacgaccaggcctggacatgcatgatcgatgcatggcacaacgttgcaaatatgagtagtatttggtatttcaggttataaaatatttttgattttggtcaaagtcaaactgctttaagtttaacaagtttgtagaatagtaacatttacaaccgaagacaaatttattatgaaaatatattcaattactgatttgatgaaactaatttagtattataaatattattaatttgtttataaacttagtcaaacttaaaacagtttgactttgaccaaagtcaaaatgtcttacaacttgaaacagggggatattattttcaggggtgggggtggggggaggaagaagggattgccgcatgtggggtctaacaccatgttgtccattttgttttcatgtatgtgccacttcagaccgaaaccgccatgtacttattaagagttaagatatgagagtagttcatacggtttcaaaaattcacaagtgttaaatgtctggtgttaatgtagtagttgaggagtaaatcatgcttttttaggatcacaattaactgtacatgtacaatcttccctactactgcaaatgttctatatatcctccctccgtttctaaatatttgatgctttcaaaattttaaaatatgtttgaccgttcgtcttattcaaaaaattaagtaattattaattcttctcatatcatttgatttaagtaattattaattcttctcctatcatttgatttaagtaattattaattcttctcctatcatttcattcattgttaaatatacttatatgtatacatatagttttatatatttcacaaaagtttttgaataagacgaacgatcaaacatgtgctaaaaagtaaatggtgtcaaatatttagaaacggagggagtatatatgaccgcaaaaatgtatatgtgtgtttgtattatttgtaagatttttttaaaaaaataactactgcatagagtatatgcatatacatggtgaatggttagatatgtaagtggtaagttcaataattacatcctcaaaatattttatgtttttactgtaagatttggttaaaaattatccttaaccgtcaataaattatcaaatgtctaatttaaaaataaacaagataaacttgtgttaaatttgtataatagtaatatacaaatttgttagttggaattaattataaatttttgacagaatcttgtgttagacgttaaatatttataaaccagccaaatgaggtaatagcgaataattatatctaaggcatatatgagatatttagttgagtccattacaaagaatttaaggaacatagtgagaaaaagtaaaaacggtactatatatataatattgtgtttatatttgggacggagggagcaagtagctagcctcttaaataagtatcatcctagtgggggagtaccatctatctatcgatcttcttccacacgcgcgtacgtgtgtgttggtcgtctcaaggttagttattgaaacgtatgtcttatattactaatttgtttcatccccgttgtatatgctatatatgtttttcttatcttatgtagtatatgtaattaaaataaataggagaagaattaagctggttaattattttttctggctggtatatgcataatagtaatatatagaagagattgtgttgcagggtatatatagcaaattaataatagatagatcgatcgatcgagtggagacgatgttgccgagaagccgaacgctcccgccaaggattcatgatggcgtcgtggtggtaagcaagcacagatgttgcagtgttggtaatggagcatattgatagatgctagctgcatgcgcgcgcgcgcggggtgatcgatatatgatatgatggatgctgcaggtagaacgcgatgtgaggaggtaccagcagctgccgcagcaggtggagatggagatgacgacgaccaagaggcagcaggatcatcaggtggagacgatgacgacgaagaagattgatgaagaagatgaagaggtggacgacgacggtcgggcgaagcggagggggacggtgtggacggcggcgtcgcacatcatcacggcggtgatcgggtcaggtgtgctgtcgctggcgtgggcgatcgcgcagctgggctgggtggtgggccccaccgtcatgctcctctttgctgccgtcatctacttcacctccaacctcctcgccgactgctaccgcaccggcgaccccgccaccggcagaaggaactacacctacatggacgccgtcaaggccaacctcggtcggtcgatctagctccttggatcttgcatagtactagtatatacactacacagatcgagatatctgatccatcaatatatcgatgtgcaggcggtgccaaggtgaaggtttgcggatgcattcagtacctcaaccttttgggagtggccatcggttacaccatcgccgcctccattagcatgatgtatgtgcgtagttgttatattttgggagaaagagagagagagagagagagtaataataattaatggaagaaatgcatggtataaatatgcagggcgatccagcgttccaactgcttccacgcgagaggagagcaggatccatgccacgcctccagcaacgtgtacatgatcatgttcggcatcgtccaggtgttcttctcccagatccccgacttcgaccaagtctggtggctctccatcctcgccgccgtcatgtccttcacctactccgccgtcggcctcgccctcggcgccgcccaggtcgcccagaaccgcacgttcgccggcagcgccatgggcgtcgccgtgggcttcgtcaccaagaccggcgacgtcgtcacccccgcgcagaaggtgtggcgcaacctgcaggcgctgggggacatcgccttcgcctactcctactccatcatcctcatcgagatccaggacacgctgcggtcgccgccggcggaggcgaggacgatgcggaaggcgacggggatcagcgtggtggtgacgagcgtgttctacctgctgtgcggatgcatggggtacgcggcgttcggcgacgacgcgccggggaacctcctcaccggcttcggcttctacaagccctactggctgctggacgtggccaacatggcgatcgtggtacacctggtgggggcgtaccaggtgtactgccagccgctcttcgccttcgtggagaggagggcggagcggcggtggcccaacggcctccccggcggcgactacgacctggggtggataaaggtgagcgtgttcaggttggcgtggcggacgtgcttcgtggcggtgacgacggtggtggcgatgctgctgcccttcttcaacgacgtggtgggcatcctgggggcgctcggcttctggccgctcaccgtctacttccccgtcgagatgtacatcgcccaccgccgcatccggaggtggacaaccacctgggtcggcctgcaggcgctcagcctcgcctgccttctcgtctcgctcgccgccgccgtcggctccatcgccggcgtcctgctcgacctcaagtcctaccgtccattccgctccacctactaattaacgatcgatgattgtgctactagaaaggaaataggtatccgatgtatcatgagcttgggctggccataacgatgcaatattaataaggcctcaacccacaagatgcaacgatggtttcaattataaggttgggctagacacggttcatccacatatactagctttcaattactaagtattcttattttcttattgaaagtcgcttgctttttttacacgacaatgcatcacatcaacaaaacatactactagttgaaacctcatgttttactgcggaatttgaggtgaacactcgtcttatgggaagatttatagaacaaacctacaaagggattcacaataaggacatacgatttacatcacattaaaccactaaataagtagaaactaggataaaatgtagaattggacaacatgaaaagtcaaaaacagatcgatcaagtgtttgactcggaaagatcgatgggttcgtggggcgcggcatatattagtctatggcttcatgccagtagtttgcacacatcccgtacgttcgagatcaggccatggcccacgggagtgcgtgggacatggagtacataatgaaaggtacggtggcccaaactcgatcggagaaggcacgtacgcttccggctacacgatcgagcggcgggacgcgggatgatgcaatgcacgacgcgaaacatatatatatatatatatatatatatatatatatatatatatatatatatatatatatatatatatatatatatatatgtatatatatatcggtggatgaaaaaaaggtcaacggcgtcatacattaaaatatggaggtaatagtagctagagatagaaattttgacataaataaataaatttgtcctattgccaattctaattgtcaacaatatgttgtcaaatatcttccgaaatgccatggatatgcaagaaaagtatgctgtacgtaatacaccaggactagatcaggttctttaattttacaattaattaaatgcgtggaattctccgttattagaaaataaaagacgatgaacttcctgcctgccatgatatgagataatgaagtcacatctctcaacagagatgatcgatcgatcgagtgctcctagcttgcccgcagccagcacagaaaatcagcgctagcttaattagctagctatacgtggatgatatcatccattgcatcatgcattcatcttcaatcacacttaattagtgccttcatctctttctttctagagacgcaattttaaattaaaaatcggtctccgtacgtacgtcgtccgtcgatcgatgcctaattgagcacgccttaaggtaagacaagcaccaataaggaaaatattatcccttgtgtgtcaactactaacagagaacaaaacgttctctgttgatgtgtcaatcgatccatgcatgttgcttaagccaattaagacaaattgccaaaaaagaaaattaagactttgcttgtccccctcatgacaacccttaattaaggtgcactttgatatagtttatacatgatactggaaggacagacaaaagtaatgttccttgcaatcaaaggttatttcctgatacatttacaacataaattatcctttcaactacataatccaggaaacaagtttgattaaattgtctaacattatacataatattttcgagcattgctccggtccagcatattgtacctcgaggtaccaatttaaatctggccgttcattcacggagggtaagatagaaaatatcacacgctaagcagctcgtgatgctccttctctctgactgagtgactgtgtcaacgaagactccaagagcaactgagcaagtccaaaccaagagcaagggcgtggtgggagcgggacgaggggtggtcggcgccggtggtgccggaggcgttggcggcggggtgttggacggcggcgcgttgggcgccggcggtgtctgcacggcggcgaggtaacgaggagcaggaggggtggtcggcgccggtggtgttggacagcggcgcctgcgtcggaggctgctacgcggcggcggaggcgacgaggacctgcgtcagttgtcgatgtgctcgaatccggtagcgataggggaagggccgcggtaggcgtatgtcaccggcgagcttgggggaagtgatgcacggaggctcgtcggccccctccacctccactccggttagcctgtccatccctggtgagagccatcgatcaatgcaggcatgcagcatcttttggagagagaaaagacaggaggaagatgaagaagatacatgcgaaattacttaactacccttgcttctttagtacctctctatgctctgtaaaatcacgtggacaatactactaggtacaactctttctcacccgttggatcaaacgaaatcgatggctcaaattgcatgtaccggtaggtaccaaggtacctgctggacagtaaaaattatcaatattttcatgtgttccaactcttaatgtatgatgctatcacataaacaacatgtcttttataccggtttgggtggcgtagtacctacgtaatttatgctaaaatctatgtgattttagaaatgacatttcaattcatctatttattagcgggagttggggatatgcccccatcaccttttttttatgtctttcttcttactttaagatttttttttactatgtacccattggtagaactagagatgtaatccatttctattaaactttaattaaattagagtgacttcttcaataaaggatctttatcaggaggggacgatctcaagtagctgccttttttttttctttttaagagaacgctataaaattgatcatatattgaaggacgaaacaaataatccacgataatataatcagataattaaaaggatcagatggacagagggagagagccaaacatagaggggcgggttaatcaggaggtaagaacaagtggagaagacaaggataagagatgagaagagcaatgagctatgtatcaataaaataattgatgacctggcagcttagcttaattagtgcagctggaactgataggcgcgcgattgatagcttataaatcgaaggagggggaaggcctcatctccgtgcatctcgctacctaacctagctaacctcctctcttcttcttcttcttcttcttcttcttcttcttcttcttcttcttcttcttcttcttcttctaggctagcactgcacgtgcccaactaacacatacattcatcatatatacacctcctcctccttcttcctctaagttgtgtgtgcatatataatctactagtagagagcagggctaggctagcaattgcaatggcgcctccctatgaaaccaggtcagtcagatcagaattatatatatttatgtactaattcatgacctgctagcaactagatagtaaaagagttataatctatatatatgaagaaattgaaatctcggtatatatgtatctgccttaatgcatgcagcgccgccggctctgaatcgccggtgccggtggtaacggtggatgtggcggcggcgagcgaccttatcacctcggccggccaccgttacgtcgacgtcaggtactactacctatctgtctgtctgtctttgcatcctcccctagctatatctatcgatatcatgtaggagtatatgaatatcaggatatatatgatccatccttaattaatttcttcatgcatgagcaacgagagcatatatatatacctcctaattaatttgttggagaaatgaaattacagcacatgcatgactatgtgtgctggtatcttcgtctgattgatagagcaattaaacatgattatgcaggacagaggaggaaatgaacaagggccatctacacaactccctcaacgtgcccttcatgttcgtcacgccgcaaggcaagtcagccagccgattaattcactttaatctgtccagatttttacaccatttttcatcgtcgtccaaataactagcgtaatcaatatatatactcttatgattcaatactagtactttaagaatttggaacaagaaattctgtctacacatatcgatctcgttctcgctcaaacatatccatccactcctatcattttcatgaatagtaatttcccactacaaaacgatatactactatatgcatgatgcttctggttgttgggttgtgtctgtacctgggcatgttgagcatctgatttatgaacgtggacgtgtgctcgtccaggtacatacggggggagtaattaacaagcatgattatatttatgagcgttattatcatccatgttgcagggagggaaaagaatcctctgtttgtggagcagttctcgtcgctggtgagcaaagaggagcatgtggttgtggtacgatacgaattaaaattaaaattccccaaaaaaatatttatttgacaagaaataatatatgtgctcgatctaattgacgaaccttgtaataaaaataaacaatccaactattaggggtgccaaagcgggaagaggtcggagctagcatgcgttgatctccttgaagcagtaagtttgatgtttttaatcaaacacgtactagttgcacttgtacttgatcgaccatcatctctctctacgtttctcattgccttgttgatggctctgtctcttgttccctgtttacttcccacacacaaaaaaaaaattacaccatatcacatagaacatttgaacacatacatacatgattaaatataggctaaaaaaacaactaattacgcagattgtgactaatttgcgagacaaatcttttaaacttaatttctccatgatttcacaatgtgggctacaataaacatttgctaatgatgggttaaataggctaaattcgtctcacggtttactgacgtattctataattagtttttttattagtgcccaaacacccatgcgataccttttataatacccgatgtgacacgccaaaactttacacatttgaatctaaacactcccttaatatacatacagtgaaacaaataaagtaaaggaagacgggacaggtcatgattcatactcctcgtctaaaaaaatgaatatataactggatgtaacatattgtagtataacgaatctgaacaacgatatattcagattcataatattaaaatgtttcacatccagttttagattgattttttatagaatagattggttttttatggaacggagggagagtacgagtgagttgtaacatgactgacatacagtatatatgtatctgcaacaggggttcaagaacgtgaagaacatgggaggaggctacgcagcgtggctcgacaatggattccccataaacactcctcctcatacaatgtattaacgctttgcagcaccgatgagatgagcgagtgataaacacggactctactgtatctactgtatctcattccaacccctcttctcatctgcctgctagccgctgcttcgtgtgccctgccatgtatatgtatgtgcgtcctgttttcctgtttgttactactggtattatggaggcagccaattgaataaaattgatcatcatgcatgcaatgcacgatgcgtctgcaaatctccgggatgacatcaatcaaccaagtagctacacatgttcaaggactttattatctctaaatcagcatattgtggccggtttgccaatccaccataacagtaggcgtgaggcagagcctctggttacaaatccaaacgaacgactcataccaaaggggcaggccaccttatgcaagaatcatcaatcaaacgtttgcttctcttgccatctgctatgtgctgcgccgttggcactaaagcattgattgatcgatcacctcaaaaattacagtctcacatctcagactgccggttgcagggcaaagtgtagagaaaccaacatccaaacaaatgaagaccacacatcacacggttagatgtgcaattagctctttctttggacgtccatcgccacagccagatggcgagctccacaggacaaacaaattgatgactacaataagtatgactcaaccacggtccgcccaaacttctgctcaacatcctttggcgtttcaatctgcaaacaaagcaacatgacaaatcatttctctacttgaaaaaaaaaaataaaggaagaaataaatattgcccaaatgttgcaatgagaagctaaatatatttcgagtaacgggcactcacggcgtttaatgctatgaagagagctttgataacattcagggggttccttgaaccaataatctgcaagtaaaagacagaaaattactactatctttcaagcacggatggagtgataactggttgcctatctagaagaagtgcacctttgacttgacgttgctgaaaccagctaaatacagtactgtttcaaccgtcctaccagcagcagacattccacttctcattggtccaggccagaggtatatcttaacatacacaagcagcaaccatgtccacataagttgcagcaaaaccacagataaataagaagagcgctaagatacacagatgtgtttttacctttgtcttctcatatttggcctgaattgcatgagcaattgtgtggtcctcatatcgctccatgtaatggaggtcctggaagcatttctcataagcctgcaaacgaaaaaaaaaatcaataaaggtattggatgccagcaagaggcataaattagctcaggtattagtctaatcagatgtccaaacccgcaattgaggatcctcgacgacaatatataagaggaagctactggtatagggccataagaaaaaaaaaactctactgcatctagtaataaatcctgcattaacaaggatataaatgaaaaaggttctgaaatgagaaaaaaggcatatgcagtgcacataggttagcaccacaatcactgcacaaacatcccaaaagaaaaggtgaacaagccaacaatgaaatggataacacatcagcgactattctttgcgcgctgaatgagaaggcaatcataaagtcgcaccgactacaagaaaaggctctaccaaacaagttgtagacgtggcactgaaacgtaagttgaataagaaagatccataccctttgaattgcaatcttggctgtcggacctctagcttttgcaaatcctacaacaccatggtagtttccagtcgctaacaatgctgtgaattttgctatttggcctccctgagacgtgaaatgcataattgggtaatgggtcagacaaaagggtattactagtaggcgtgatcatttgaattcgaactaagagaattcacctttgtgactttacacgtccgattaacatcaatgaccttgacgtcaaaaccctgtaaagtgcacaagatttgtaactaggtaataccaataacaacaagtgaaagcaatgtaaccacaggatagggtgctggccaatccaatgaaagctcggagatgaacatcacttactttcctgtacataggtctcctcttatgctccgtgagggagttgcgctcttcaacaagatccttaatttcctcctctagaactctgcccttcttaccaaacgtatgatctaactcagctaatttctcctcgatcttcttttcgatagaattcaacttctctatgagcagatcatccttctccttgtcttcattgaattcctcgtcgtcgtcgtcgtcaccagccccttggatcatctgcttctccctgtcaaagccagcattgagcacaagatcctccggagagccgacctgctggtgttggatgaccccgaaattggaggggttgctgggatcgtatgcttccctgcattccatgattctaacagctcggttaagcttctggaggagaagaaagcggtccttgccggtggcatctttgaggcggttcatcatgtcgccgatgactctgtactccagtggaagcttcaaatggcgctcctcgaatctgtcgatcttggtcatccatttgtgggcatcgtcaagggtttctggcaacagcgggaggtgtttgaagtgggcattggcgaaggaaggaaggaaggaaggaagaggggaatgggctttaccggcttcggcgaaggagcgtaggagttcggagtggcggttgcacttgcgctcgaactcgtcgacgcggcgcttgatggcgtcaggggtgtagcgctcgtcctcctcgtcactgtcggagtcggtgggctcccagaaggaatcgtccggcgcggcctcctccttggccctgcggcgctcgagcttctcgatgagcggcttgacgcccaggtagtcctcatcctcaccctcatcctcatcctcctcctggcggtcccgctggcgctctcgctggagctcggcgaagaggtcgtggatgacccgctcgctctggatctgcttgagcctagagctgccggaggaggcgttggcggagaaggcgaagtggcggcgaggggaggcgatccgcagggttagatggtgggtggaggatacgggagggctggggcgcagggagaggaggcgcgcccacgcggcggaggcggcggcgcgggaccgggcggcggcggaggaggccatgaacctcccggcggcggaggaggagaagggttttggtagccaagtgactactggaccttccggactatactgacttgtgtgtcggcctgcccccatctacatttcttagtggcccatctatctatctatctatctatctacgaataagttcatttaaggtcctttaacttgacagcgcgttcgattttatccttgaacaaaaaaaaaatcagatacaacgggtccctcaattatcaaaatcggtacaatataggtcccacgacagtatatcgggtggttttgtccgccgttgcaatctaagtcagcgtgcgcccaacatgtcagggctcccctcacccgttattctctctttctctctaccctttcccccttccttttcctagtctaatactccaataccatcaatgatgaagcagggttaaggatacctgttgggagggtgggggatgaacatcggcattggcacagcccctcttccctatctttcgtttccaacggctgtaggatagaggtagctagcggtggtagaggcgggacacgacgaggtggtagtagtgatagccgatgaggagcaaagggagaccaaggcccgcgacagtggtgtcgacatcttccttgcaactgacattgtcgtcgttggctcgtcttgtcaccatctccctccgacgcaatggtgcaaccccatattcgcatcgccgttacatcagccacacgaaggaggaggatgaagggagctcaccagcgatgaggagcagcgagaatgaggacgggcgaaggaggagctgctggaggcctggagcgaggtgacctagtaggcaagcagtggtggcagcgggcgtcgggacagggcgcaacggtccatggatgtcaattgtcgtcctcctcaccattggtcttctctagtgacgctttcaccacctccaccgatgctaaccctaacgctggtgctgccatccccacctctaccgatgaacatgccaccccctctgcccatcacatgtgagcctaccaccaccacccttgacgtcatagtcggcctcctccagctccaagtccccccaacaactggaccgtgctggccaatgagatgtgaacaaggggaggaagagagagagagaggtgaagagagccctgaatacgggtcccacactaactcacacgctgttgactcaggttaaattgtcacgtcggacaaaaccatcaattatactgtcgtgggatgtatatttgttaacagtgaaatttggtaagcccggagtaatcatcggcttagagtcagcatcgtcttcgaagtcctgagattagccgatgagagttgccaagtcgtcagttgtcgaattcttgctatattcagttaaggaaattgatctactaaaggaagcttatccagaagagaccgagttcaaagagaatacggcacgacaagttatctattaattaggaatagtttattagtttccttttatctttaggaaagtgtgtttagtgttctataaggactttatcttttccttttatctttaggaaagtttctttcttgtccgacaaggatttgtatcaatccatgggtataaatatgtacacccggggtctatgtaatttatcttcacgatcaatacaattcggcgcatcgccaccttttaccttttctactttattttatcgtccggcgggacttggcacctgacgcggggctgcatcggtgttcgatctccagagaaggggtaagtccaatgttccgtcggcccaggcaattgtctcatctacatcggcgtcgttcaaggctgcattagtacattcgacctcttggattgctctggtttggatgatatatttgcttacctatttatcatatgtctctgttaatctagtcttagcatatcaatttagctctatcggctgcttctcgttttagggtttctgccggtatcggctaaatcttcatgctagattagattagcttagacatctaccaccctgaaaattcagtcgacggcttgattgtctagatattgtgtttcttttcatacttagtgctgcatcagttaagtttgatctactaagtcgtgcttagaaccataatctctagcctgcctttgactgccaataagggtttcatcggggtttcagccgatgagttatctaggcgttgcatcgactcataaggattgcatatacatataagttggatttagccgatgacaacaaatgtttcactgtttaatctaatattgtggatttcatgacatcggacctccagccgatgtgtgctttaaccttcggatcaatgcctatttatcatatcattatttaccgattggtttatactagattatattgttattttattacatcatcatcagccgattgcctttatatcatcatctacattggacatatagccgattgcttaaaccctatctctatcggctggtataggcatcggctattatcgtctatcggctggaactactccatcggcttgtcatccgatcgactgttttgatctactatttgcatatcttgtcagttgcaggatcaaactgactggcacgcccgcatctcaccaatctttggacctgcacaagagctaagcagatctcctaggccggtgtgttcgattttttcgtcaacaatattacaccggttatgacggttgagtgatccgttatatctgtttttttttttctgttaaaggatgacatcagactcgttgtcaagttaagggacctataatgaacttatttcatctatgtatcacatatagaatatgattggggtccagcccaagagagtccgacagatagcgaggaggaggaggagattagtgtctacaaaagagaaggaaggaaggagaggcggagaggaaagagaaagaggatcgtctcggctcgtcgtcttctagctagggttcgtaagttctagggtttgcgatgatccccaactcctcctccctctagtatttcgagcgaattctccaacactttcacccagccgcgcgcgagaggagaaggaagatagatagatagatcgctccgcacatactatggtgctcaccccatcgccgtctccaccgccgatgctccccaagaagctccgcgcgctcggtccaggcttgaatccctttgctcccttcggcatgggtaactactattcctcctctcgctaatatatttctcctcgctcgatccatcttcccccacctccccccttctcaaacaattaatccccttcccgattcgattcgattcggttcggttcgctttcggactcggtttcaatttcgattctccctccgtcgtcgcggccctattctagccgccccctcccctccgctcgattgcctgcctccggatggtgcaattccgcagctctctcagcatgagccgggcacggacccgccacggcgatggcgacgaccgcggctggaaccagctccacgtcgcctcccgcaagggcgacctcaaccaggtaatcctcacgttgtcatctcttacgttttactaactgctctattataattatattatgcattggcttattttctccacgcagcaccaccaccatcgtaatgcttctttaaagataacgcatactcttctactacatagattataacagtactgaatgattatagaggagggttaacaacaactcataatttgaatcaaacaacaaggaatgtaaccatctctgcaaatagtaataaaggataaatactacgagtagtaaattatcattagtcgccaaataaattagccttcatgtcatcaccattgaaacaataaatttgatttttcttttttttcttcctaaggtgaggcgtctcctggatgatggcatggatgtcaatgcacctgcatgggggccaaaatcacctggcgctacccccctgcatttggctgctcagggtggacatgttaaaatcatggacgagctactggagcggggtgcaaatattgatgctcgcacaaaaggagcttgtggatgtaagctcaaatgtttcttcccagtcattgcatgcattttcatgcttctagagcttgcctattctcttttatttacgattggtctgagagcagtttctatttattattattacatataaagaaggtttcatgcccccccttgttttcagtcctctgttgagcagattacttctatattcactactgctgcttgattgcacaccccatctagtttagtggattgacttgtttttattcaatcattataggagaccatatccttgaatgaaagctactccatgtttcatatactcagaagtttctgatgtcttgctcattagatcgaaacgtacaagtaactttctcatgaatggtgtatgtcttcatttaatacctgcaatgttgtactatgcaaattgcaaataccgtaatgttctggatgaaattatttatttgctcagttttctgttcccaacttctccagtggttttaaatttattaaaacaccttgtacactcaaagaggaggtcactttacctccggaatcttacattttcctcgtttggtggaatcagggacccctctacatattgctgctaaggaaaggaacaaaagagctgtcaggtttctgattgagaatggtgcattcttgccacctgacatgaatgaccacaggttcaatcctcctctccattactgctctggattggaatgggcatatgagatgaagcgcatgcaagacgaaagtgattcgaccggtgaaacttctctgggctcggagagctagaggaaagcaatctcctcagtctggcaaagaggtcaatcttggatcaacagagtttgtaaacatcaagggtcacgtttactttgtgaaattggaacgaattaccatgtgaatcttacatgcgacatggtactagcatgcattgcgatgttgttgtggggttacttgtgttttcgataattgcattgtgttcttactacactggtagcatgtattctactacacattcttaatatcagaatcaatatccggtttgcgtcctatgacagtatgcaatgtgtttcttttttgatgttgttgctcttactaagaaataggatgtgttgacgcttatcaccggaggttctactactttggctgcaaggtcgatggagccacatacgatacgaatttacgctcatcgtcaattcatcatcattaaaaagaaaaaaaatcagcaatagcacagtagcagcaatattcattcatatcaacgggcagcagggtacagtggattaataacgaaacaagtcaagagtcactagtctacatacatgaaaacgctgccccacctatgaaaacttgagccgagctactaaagttcgctgcaatacatcatgcttacgagttaacaccaccggcatgcatccatccattctgcacacaggcaaactaaactggatggaggtacataagcttagctcacatgcactctggctgctgaaccaacgttttggatgatgaacacaaagactccctggacttcctccatatcataacagcatacaatgagctgcccgtaaatctaccgcctcacaggaggtgcaccaccccgtccaactggaccaccaccacgaccagcagcagcctgcatcaattggaggtcaaaagattaaatgttgcgacaaacagagcacacatcaaaaaacagccttgaaggccagttagtacatgtgcataaccttacgctaaatacttaaaggtttgtgtaatttaaatatagatgcttcaaggtgatagatgaagggaaagtattaacagagagaagattaactttgtacttgttaacagttgacataatatttgtcagcttaatttcagaatcacggcataacgcaatttatattgtctttagtaggtttgaaactcaatgcatgaaatcaatggatttgcaagcactgattatataatagtagtagttaagattcaccagcctatatcatttcagaatcactgcacgatgggatactgtccttgttccttaatggagttaaaacagagtgcataaagttaatggtccttgagttgatagcaatatgatggaccatcacatggttgtaaacacattcacaattaaatattctgcattatatgttgggcaaatgttactgaaagaatgaaaagcagagtatggttataggaaaaggtaaatggattcattcagtcatggagtcacccatctagtaggttatatggtctaactgggcactggacagccaaccacgtgagcaaacaggcaattcaccaaaatatagggacacccacttcatgtatatgaggcaagcatgatatagtagaaccattttttggaacactgagacatgagcaattttgaatatggcactagggaattgtggcaaaataagaaaagtaaccacataataccaagcatactaatgactggatagaaacttcctttccttaaaggtaacatgactcctgcctacaatggttatttcttagagcagctgcagattgtcatgcaaaaagatgaggcaaagactccattgatgaattgataggtgtggctcagtttcggtttgcattatggtgctagggcaagatttagttgcacaaacactagctcataactctcctatctgaagatttatctgtctatgtcatggttagccatcagccggcaacgtgattttgaaaaaaaaaagaaaaagaaaaaaaagagagagatgtttttcatcagaacaacaaacaaggaccataacagttttaaatgcaaaggcttaaaattatttgcatgtactacactgaccagcatgagctccctgaaaatagaaatccagtgctatttgctttctctaatcgaattttggccaagcaatactgatgaatcaagcagtaggaggttagatgtgaaatcttcatgttgaaagcaagcagttgattacccaatggttatttctaagaggacctgctgattgtcatgcaaaaagatgaggtaaagaccccattgacaaattgatatgcgtggctcagtttcaatttgccttatggtgctagtgcaagattagttgcacgaaaactaggtccaaactgtcctatctgaagatttatctgtctatgacatggtcagacggcaatatgatgattttgaaaaaggatgattttcatcagaacaaaggatcaggaccattatcaatttttgcatgaactccctgaaaatgccagtgctatttgttttctctaatcgaatttagagcaagcagtagtaatgaatcgaacgctaggaggttagaagtgaaactatcatggagaaagcaagcagagcagatgattacccgagcacgcatagcaacggcacggccacggccaacaccaatagctgagcctttaccctgcaggaggcgagaggcatgtcacaatccaattccaagaggaggaggagaaaagagagtgggtgaaaagaaataccctaatcctagcctcgaggcgcttgaacatgggggcgttcttgagcatgtcgggtatgatcatgaacctgaccctgcttcctctgatgaagacgtgctccagctgggagaccttgccgtcctatacatatatatatgtgcacagaaagaatcaagaatctaagaagaagaggcgcatgattcgaaggaaggaaggaagggtaccttggcggtgaaggtgatgttgtcgagctggcagttccagttgtcctcgcactcgaccatggagccgcggtacacctcgccggtcttgagctccacggtcaccacgtgccccgccgcctcgtgcagcagcttcactgggataccaaggctgcggctcatcttcctcctagggttgggtagagaagggaaaccctagctaggcagacgcgacgacgagttgttgttggtggtggtggtggtctggtggaggaggaagatggcggcggcggcggcggaggggagtcgagtcgagtcgaggagggcagatgagagagatggaggcgagggggcgacttcgatgggcccaagcccaataccatcaatatgaaaggcccaaacttgtctctgccaaaccttcagaatttgggcctaaacacaacagagcttctccacgtttcaataaaaaaaatcgtatttaacgttgtaatatggcttatttatgccttttgttaacaatgtagaatgtattaaataacatacaagattaaacccccttgttaaaaggaatagaaatgacaaatctccgagacttcgtatcttaaagtgtcatataagatatacaagcaaacaagcctagttaactccaaaagcatgtgaaagagtatcggtcaccatatttgttcctcatatatatatactgttgagattatgggcatataatgatttaatttattccataaataagtcatgacattacagatgaaaactagcatgaacgcatcattagatctacacatgtaaactacgcagaataacatgaacagatcaaatatgcgcaacatattgaacacgtaccgaggtgacgaaaagaccggctgcttggtcgaaacttttcgcaggtgtctacgaaggcacgaaacacgcgagcgaagaggaaggcgagccgtcgcgaacgaacagggagcagtcgcgcgaagcgcttcccaaaaaccttattgccgccttctcccggtgcaggacgtcaaaggcagaggttccggagacctgctctcccgatcgctggtgcacgccgggtctacgagcgacggcgcagtacagagtaggaggcaaaccctagattgattttcgcatatattgcgtgaagacggcgggtcggtttatatagagaaaggtcgcttgatcagggcgcccgcacgatctctactgcgcgtaaccgaaccggataagtcgcgcgtaacttatccggactccacgccgtttgcacgcatcggatttttcggaacgtttccaaaacaaaaacgaatccgaatttgcagcaaaacaaaactgcaaaaagaggctgcatctgcgcaagggtgaggagccaatttttcggaccattcgacgcgtacgtcgtgcacgcgcgccgcctgccctgccctgccctgcccaggccaggccaggccaggcgaggcgaggcgaggcgagcgagcgcgcgcgtgtgtttcccctcttctctccaccacacatgcttcaagtggctaggagggcatcctcccttttaaggaggtccccctctcctagaataagcaaggtggtactaaactccacatgcatgccatcccatgaggtgggcttttgtgattttccaaagaattaatcttcgagtgggctaagacccattcattaattccaacaatcccccaccaaatctcaaaatcccactgagatttgccttttccaatgtactgtttatataccagcggttcgatggagaccaattaaggttgaacatccacctagaactccaagctacacttactcacaacttgaacaatggactacgccttgaattgcaagtcttgtgcaagcaagtttcactcaaagtcttatctggtactagaccgtctgtagactacccctcgggtggagcgtataagtcatactcctaggtctttagtaagcttcctagaagattcacccaaaatcttcatggactgcgaccaacagtcaagctcacaaaggtgagttccttcaagaatgctctgcaggacaacatctttgctaattaaagccaacagaactcattaaggcatagccaacctgccttgcagctcacgagagtatatgcatcttcacttagagagggtatatatattggtactctcctctagtttattaatggtttgttcttcccaggatctaattcacgggatctccgatcacatagactgggttaccaccatagtataactcacatgggtctcaaacccatctccttcgatgcattgtctatcacatttcgtgatagtcccttcgtgaagggatctgccaggtttctcgctgtttggatgtaatccaacgttataactccggagtttcttaatttcctgacagacttcaatcgtcttttcacatgtctagacgatttcatattatccttagaactattcactttgacaattaccgtttgattgtcacagttcataaggatagccggcaccggtttttcaacaacaggcagatccattaatagatcacgcaaccattctgcctcaacagtagcagtatccagtgccgttagctctgcttccatggttgacctcgtcaaaattgtctgtttgcaagacctccatgaaacagcaccaccacccagtgtgaaaacatatccactagtggctttgatctcatccacatcagagatccagttagaatcactataaccctccagtaccgcaggatacccagtatagtgaagccccaattccacagtacctttcagatagcgcattactcgctcaagcgcacgccagtgatcatctcccggattagaggtaaatcggctcaacttgctcacagcaaagaagatatcaggcctagttgcactagccaggtacatcaacgagccaatgatttgggagtattccagttgattcctagcaattctcttgttcttgcgaagcgacaagctaggatcataaggtgttggagaaggcttactatcaatgtagccaaagcgattcaaaatcttctccacataatgagactgcaagagtgtaatcccattctcacctctaattagcttaatgtttaaaataacatcagctactcccaaatctttcatatcaaaattttgagacaagaatgatttaacctcatttatcacctcaatgtttgtcccaaatatcagtatgtcgtcaacatacaagcacaaaataactccctcacccccaccatggcgatagtacacacatttatctgcctcattgactgcaaagcctgcagatgtcaatgttttgtcaaatttctcatgccattgcttaggagcttgtttcagaccatacaaagacttcaacaatttgcacactttgccttcttgaccttcaagtacaaacccatcaggttgatccatatagatctcctcatccagctctccattaagaaaagctgtcttaacgtccatttgatgaacgagaagaccatgtgaggctgctagggaaagtagcacacgaattgtggtcaatctagcaacaggtgagtaagtgtcaaagaaatcttcgccttctctctgagtatagcccttagcaacaagccgagccttgtacttttcaatagtaccgtcaggcctaagcttcttcttgaacacccacttgcaccccacaggtttacacccatagggtcgctctgtcacctcccaagtcccgttagcgataatggaatccatttcactacggacagcctccttccagtagtctgcatcaggagatgcatatgcttctgaaattgacttaggagtgtcatccacgaggtacacagtgaaatcatcaccaaaagacttagccgtcctttgtctcttactccttcgaggagcttcactgacatcctcctcagagacaagttcatgtgtatgttcagtttgttctggtggtgtgattgaactgggaattatttcagagggttggttcgaaccactatgtgtatccttcattgggaaaaagctctcaaagaaggtagcatcacgagactccataattgtaccaacatgcatgtccggtacctcggatttaactattaaaaatctataggcaatgctatgatgagcatatcccagaaaaacacagtccacagtcttaggtccaagtttgcgcttcttcgttattggtacattgactttcgccaagcacccccatgtgcgcaaataagaaagtgatggttttctaccaatccatatctcatatggtgttttgtccttatttctgttaggaactctgtttaacacatgatttgaggtcaacaatgcctccccccaccatgccttaggcagtcccgcggtgtccaacatggcattcaccaagtcagtcagtgtgcggttcttcctttcagcaatcccattagactcgggagaatagggaggcgtcctctcatgtatgatgccatgttcctcacagaataagtcaaactcgttcgagaaaaactctccaccacgatcagacctaagcctttttatctttctgtcaagttgattttcaacctctgccttataaattttaaaatagtctagagcctcgtctttcgttttcaacaagtacacatagcaaaatctagtagcatcatcaatcaatgtcatgaaatatcgttttccacccttcgtcaacaccccattcatttcacaaagatctgaatgtaggagttctagtggtgccaagtttctctcctcggcagccttgtgaggcttgcgaggttgcttcgattgcacacaactatggcacttagaacctttgacaatggaaaacttaggaattaaacacatgctggaaagccgagacatcaagccaaaattaatatgacataaacgtgaatgccaaacattagcctcatcatccacactgccacaaatatggttcacagacttattgcagaaatcagaaagggaaaagcggaacaggcctccgcactcataacctttaccaataaaatatccatgtttagacacgactactttattagactcaaaaaccaacttaaatccgtctctagtcagacgggagccactaacaagattcctgtcgatagaagggacatgctgcacgttcttcagctgcacgatctttcccgaagtaaacttcagatctaccgtgccaacaccatgaacagaagcatgtgacccattccccattaggacggtggaaccccgtgcgacctgataagaagaaaacaatgagatgtcagcacaaacatgtacattggccccagtatcaacccaccaattagtagattgattaactgaaaaaacagtaggtaaattaccatacccgcttccatctccagtgttgccaatggtcacattagcagacttagaagtctgccctgcaggtgccttcatccccttgcgttgtggacacttcctagccagatgaccaacttggccacacacaaagcaagtcctctcatcctgattaggattgttgttgttcttcttctgcttcttgaagttggtggtctgctgagctttgtatttccccttgctcttgttctgggccttgtgcacaacattggcactggactgcccaccatcgcccttagacgcggcatctttttcccgagctttctcctcaacatcaagagacgcaatcaacccctcaacggagtattcctgtctcttgtgtttgagtgcagtaccgaaactcctccaagatggaggtagttttgcaataatgcacccggccacaaatttgtcgggtaagacacacttaaggagttcgagttccttagccatggtttgtatctcatgagcctgttcgactacagaacggttgtcagccattttgtagtcatgaaactgctccatgatatacagatcattgctagcatcagtagcaccgaatttagtattcagtgcatcccacaactccttagcgtcggtcatatgcatatacacctcgaccagacgatcgccaagaacgctaagaatgcatcccacaaagagagtagtggcttcctcgaattgcttctgctgttcagcagtaagaactccttcaggtttgccagtactcacccagaagcatttcatagctgtcagccacagagtgaccctgatctgccatctcttaaaatgcacaccggtgaatttatccggcctcagtgcatcggcaaaaccagccatagtaaaatcacagtgcctataataaggtttttggattgttgagattatgggcatataatgatttaatttattccataaataagtcatgacattacagatgaaaactagcatgaacgcatcattagatctacacatgtaaactacgcagaataacatgaacagatcaaatatgcgcaacatattgaacacgtaccgaggtgacgaaaagaccggctgcttggtcgaaacttttcgcaggtgtctacgaaggcacgaaacacgcgagcgaagaggaaggcgagccgtcgcgaacgaacagggagcagtcgcgcgaagcgcttcccaaaaaccttattgccgccttctcccggtgcaggacgtcaaaggcagaggttccggagacctgctctcccgatcgctggtgcacgccggcgagcgggatggagtagtctacgagcgacggcgcagtacagagtaggaggcaaaccctagattgattttcgcatatattgcgtgaagacggcgggtcggtttatatagagaaaggtcgcttgatcagggcgcccgcacgatctctactgcgcgtaaccgaaccggataagtcgcgcgtaacttatccggactccacgccgtttgcacgcatcggatttttcggaacgtttccaaaacaaaaacgaatccgaatttgcagcaaaacaaaactgcaaaaagaggctgcatctgcgcaagggtgaggagccaatttttcggaccattcgacgcgtacgtcgtgcacgcgcgccgcctgccctgccctgcccaggccaggcgaggcgagcgagcgcgcgcgtgtgtttcccctcttctctccaccacacatgcttcaagtggctaggagggcatcctcccttttaaggaggtccccctctcctagaataagcaaggtggtactaaactccacatgcatgccatcccatgaggtgggcttttgtgattttccaaagaattaatcttcgagtgggctaagacccattcattaattccaacatatacaacaataaactgtgaacaagcctgtcacttgcactctaaagtaggtactgccgatatgataattgataacccgacaactgtaacttcacaattcttcgtcgagaacttctcgaaccaagaagccacccataacgaaatagaaaaagcaaaagactctagacaaatctaactccttaattgttatggaaagacaaaaccctatacaacaatctaaacttctaaagacttttttagaaaagccctttaaatacctaatgtaaaccaatgagaaacgggtcccctttctgctcacctctggtgaatacagtagagatagaggaggaggactgtacattgtaagggcttcgcgaaaagaacgagtggcttatttacactctagacttgtttggctaatgggatggtaaaatgatttcccacccaccaaaagacattttaaatcctaaccattcattctctctttcatttaatcataatccttcatctatttctcaatcccaatcccacccccattttccattatccaaacacacactctggagatgatgcataattttttttcttataatttaacatataaaatggactatgctcatttctttctaatatcaaatccaaataaaaaaaaatgtcttggttcatagttcatataagctgagcagcaaatatctatactttgggaatgttttctctaaagtttgacttttgtcatgtccagaagataaaactacaaagtcgaaatttccttaaaaaaatgccttctttctaatctccactccagataaaaaatatatattggtttgtagttcacatatgtaaaaacaatggagtattgtttatttggacaaataagttttgtacaatttgagaatttcacaaatgttgaaaataaggcgagatgaaaaatacaacctcaaaataaaaaaaaagacacaacaactagagaatagtactgtgttaacttttctgaaaaggctacgagtaaaaaaaatacttcttccatccacaaaagttagacatatttcacatttgagtttttccaaataagttgtttctatttgtagtctttatgcatttaagacttaaataaatagataaattaaatatttgattagaacccaaagagtcatctaataaatactcattggttgcatgcttatattcactccttaattttgtagcatctaagataatttaatttctccttagtcttggtgacaaaagtaatattggtaacttttatgtatagagtgagtgtttgcaaaactagatttataacttccatatagttagactgaatgaattagtgtcgtttctgtctttcatgtaagtataataataaaaaaggaatgtttttcctttcataattaattgcgtgggaaattatttatttagcaaatagagcaaaaggaacaatataatgaaggaaattaagaagagaaggggaaaaagaaattaagagttaaatatataatgaatagtttgtaggtgtggcaattaagcgtgagtttcggtccgccaaccgcgcgctcttggtcgaccacaacgcatgctactctcagcctcagccaaccaattctgcaaaatgcattgatcgatcgatgttctctcctccctagctgcggacggacttggatccatccatctcccattcattcattcattcattcatgtggccatccatccaccatcttgcatgctagctagctaccctgcaggcccataacgacattattcaattcgaattaattccatcatcatataataatatatatgatgctgagctcgtcggcgtcgaggcgggaggtcggcggcggcggcgccgcctccagcaccaagagcggcgagctgtccctgtccaaggtggccagcgtggccatacgggagtcgtcgggctcgggctcgggcgggatttccaagagcagcgaattgctgtcgagggcaggaaccatggcggcggcgagggaggcggcggcggcggcggtacaccacgaaggatggatggtgcgctacggccggaggaagatcggcaggtccttcttccacacccgctacttcgtcctcgacagcaggctcctcgcctactacaagaagaaacccaaagacaacatggtacccgccctaactccatcatcattcattaatcaatcaattattactactcgtactaatttcaaacactcttactatcactgccttgttttaattttccttcccctggcacacgcttgtctggccaattacattgtgtaacaaaaaaactcttttcattctaatatattgatgcgttcgcgaaaaaaaaacactcttactattacacatttgcactactactcatagtaaattcaaacacacacacacacactatatatatatatatatatatatatatatatatatatatatatatatatttggcaccaaaaattaaatatgcattaattcagtcacatcatctagaatatagtagcctttggatccttcttatgctttgatctcaaccatccatttacatatgcatttacaacccactaaatacatagttattagtataaaattcaatgtgcattaaaccataacatctacaaaactaatagtcattggatctctctctcatatttgatactccctccatccctaaatatttgacgccgttgacttttctttttatacatatctgaccgttcgtcttattcaaaatcttttgtgaaatatgtaaaactctatatatacataaaagtatatttaacaataaattaaatgataggaaaagaattaataattacttaatttttttaaataagacgaacgatcaaacatatttaaaaaagtcaacattgtcaaatatttagatatggagggagtatataactatcccagctgtcatgtaaaattgaaatttataatcaactactattgagcaaatattctctatttacatattataagtacttgatttacatattgctttcttttaattttctataaagtatttttaaatttcctgctgcaatgcgcgggatatgcactagttatatgtaataatgttgtacatgcatatatccatgcaggtgccactaaaatcgctgctgatagacgggaattgcagggtggaggatagaggactcaaaacacatcatggacaagtatccattatttcttctaatttatctcctttccgtaccatccttcttctcatgatatactgtatcaaccagctggcttttacacctgacattgcccccgtccttctcaattgacgatgtatcataatgatccttaattttcagatggtctatgtcctgtgcgtttataataagaaagaaaaggagcatcagatcacggtttgttctaactaaacctgactgcatgttctcgatctctttcattcagcgttatatcagtatatatatgactagatttaattcgcagatgggcgcgtatgatattgaggatgctctggcctggaaaaagaatatagaactcattatcgatcaggtgcagtaatttttcttcatcttacagttttgactttgcatatgtaaacacaacaagtaattttggagtactggataattctcaaatttcaatgaaaatccattttcatgtcgaatcatctaatacccaaaatatgtgactcttagaccgtccagctgccttattcaggattttctaatgaattaaaccgaacaaggacctttgtacgtactgtttaaagggtagttaatttgggctggcagaactttaggtgtactctttacggatatatgtagtaaattaagctgcaaaacaatatggatgctccatgttgttttgtgaagtatcacatcttcacattgttgcagcagcaagaaaatatgacctccaaaaaccgcaaggcctttgcttcaatggactttgatacggaactaggagggcagtttatattctcagaccatgacagcgcgtaagtgacatcccatcttctctcttagattatcttacaaacgacaaacaaacaagatctgaaataagctgaaatataatttcactacgaatatatgcagagctgaagatgaagaggaacgacctatgttgattcgcaggacaactatagggaatggtaacaagttatctgcaagttttgttcttaatttccgtttgtggatcgatatgctacagaaattcaccacctcatttctggtgtgctaggtccccctgaatcaatacatgactggaccaaagagcatgatatcggtccacccaatcagattgaccccattcaagttagctccaagaagaattggcgcctacttagatgccaaaatggcaagcacacaagactcctcctcctcctccttaggttatcagtcaatacttgtctacttgttgcttacttccttgtcattcgcaggactacgcatctttgaagaacttctggaattcgattatcttgtatgtccagtctactcactctcgactactgctagacagttaattgattagatactatgcatcttctgaaattcttgatgatttttcacttgtcctgtgtaggcaagaagctgtagcagagctatgcgagctgttggtgttgtggaagccacatgcgaagccatttttgggctggtgatgagcatggatgtaacaagatatgagtaagcatatttactactatcacctatatatattcctactacagttacatattaatcttgagattacgtactgatgtttaattattgatcatcacgtataggtgggactgcagctttcgctatggtagtttagttgaagaggttgacggccacaccgctatactgtatcataagttgcagttgcactggtgcccaatgtaactagtcttctttcttgtccgtagcattttcaaacatcctcctcctcttcttcttcttcttttttttggagaaatttcctcttatttttgagtgcacaactaaatggtagtactaatatttcggattatctatcagattgaaacttacacattcttccattctacatgaacatgcaggttagtatggcctcgagacctatgttatgttcgctattggcggcgtaatgacgatggaagttacggtaaaaatattcaaatcttttccatggaatttgctgttttgtagagcaattaatttctgattgtttgtttggacgcagttgtgctgtttcgatctacagagcatccaaactgtggacgtcaaaaaggatatgtgagggcttttattgaaagtaagcttctctctgagcatctgaaatcctgcattaatttacctgctgagatcgatcaggacaggaggaggagagacagtatactagttccatagaaaacagacagaaataaatgtcaaatgaagttccttttcttttctgaaattcctactagttcaggtggaggtttcaagatttctcctctcaagtgtcgcaacggaagaccccgcactcaagttcaacacctaatgcagattgatctcaggggatggctcctcaactactctccttcctttcagtatcattctttgctgcagatacaaaactgtgtagccggtactaactactgccactgctcgaaacttagtttgctcaaatgaattagtgccatcatcttactacttcactgttatcctaattaactctacttacttcaaggcctacgagaatacttctcccaaacagacgaaacacatataactccaaggattcctgtgatggaaaacatggttgacacatctgcagtacagaaagatgacaagaagagtaccgaagaagtagactccaagactaaaacaccagatcgaggacaagcggacagtaaaaacatgggaatcattgatgaagaaacagacgaggatgaggactatcaggttcctgaagctaacatagaggtgcttcatggccaatatataacattacatatgaacagtgaatgagttttttgtgtttcctcattctaactaaactgtgatcaaaattaattaatgtgcaggaagatcctaacaaagatgctaagcgtgcaggtatgattcctttttttttctgcaatttattttggtattaatctggtaagttccataggcaatcatatattcttcccctgtaacaatgacacggtttgccttgtgattatggcagacgaaccaccagaaaagattgatctatcatgcttttcgggcattcttcgttgcgatgcggatgagaaaagccgaaactgttggacagtacctgacagcaagctgtttaaagtccgtagcaagaacttcccgcatgataaatcaaaggtccaagcttttattgcttaatttgtttctttggaattgaatccagtgagtgagattatatgaagaagctgagcacactgctcacattgaaattacagatacctgcagcgagttacctgatggagcttgcggccattgactggtttaaggacagcaagcgtatggataacgtaggcaggcagaaaggctgtgtagcccaggtaaacataataaatcttgtgatcgatgatggcttatcctatctgaagttatcaagtagtatcatcacagaacttggcggcttggtcgatgtttgttttgtaggtagctgctgagaaagggatgcatacatttgttgccaacatacaggtaagtatgtttgcagattcagagctagctagctagctaggaggaaacattggcaatcaaagttatagttatgggtgtgtatatatatattgtgttgtagatccctggatcaactcattacagcttggtgatgtacttcgtgacaaagtcgctgaagaagggatcactgctgcagcgattcttcgatggggatgatgagttccgcaatagcaggctgaagctgataccctctgtacccaaggtaggtagtccagctgttggtctcaggtagtgaactgaactgaactgttggtctcaggtggtggggtggggtgtgcccgcagggatcatggatagtgcggcagagtgtagggagcacgccgtgcttgctggggaaggcggtggattgcagctacgtgcgtggagccggatacctggaggtggacgtcgacattgggtcgtcggcggtggccaacggggtgctgggtttggtgtttggtgtggtgacgacgctggtggtggacatggcgttcctaatacaggccaacacctacgaggagctccccgagcaggtcatcggcgccgcccgtctcgctcacgtcgaacccgccgccgctatcgtcccccaggaccttactccccctcctcctgcccttgccgacgacgacaacgccgctgcttcttcctccgaggatgatcatttgtccaagaaaaccaactaagctagcacctctctcaacgcacgcactgcaacttatcaatcatttatcttcttgtaatttctaattatttccgaggctcatagcaagctttgttttttttcttttcatctttttttttatctcgttaagttgtttgcaaagtacagctggttttcttctacgtaggaacaaagataaatctagctagtgacagtatttcgttggaacctaatattatagactgagatattttgtttaggcttagatttgctgtctttggctttaagtcagacttttaattaacttacactccctccatttttttaattgacgacgccattgacttttgaacacatgtttgaccattcgctttatttaaaaattttatacaaactatagaaaagcccgtgcgttgcaatgggtgataactattttaatcttattattgttatatggtttagttacgatgaaattcactgtgagaattcgcttggatttatatctctactgttttaaaattctgtagtggtgacggtgactccaaccctgacagacacgcgacttattaaccgtgggattggcagatcggacggtgctgaggatcccatcgcacgcgctcgctatccaaccgtcgacgccgctcccctcatccttcgccgcgcccccaccacgccttcaccgaccgccactcctgctcgcccgaatcgacgccgccgccgtcgcgggtcgacatcgccgctcctcctatcgcgctcctccccgccggcactgcctccatccatccgccgcgtctcgccgccggtcgcaccaccgatccattcctcctccgccgcctgctctcccggtccctcccgccccatcgccccaacacccccccccccccccggcaccgcctccatccatccgccgcgtctcgccgccggccgcacccccgcttccatccatccactgcagatcgccatcgcacgcctccgcctctcaaggtcgcacgctcatcgccgccgctcgtcgcccgacaccccgccgattggggaccggacgctgaccctgcatcgacgccacaacagccgacagatgggagatgttgaagacctcactccaacgacggctgcgcgcggtgacactaccaggcgttgagggagagaatgcagtgcgaggtgcgacggggttgttcgtccttgcccagatcaacgccgccgccgatccctcactcgcccctcgcccaggtcggtgccaagggcgaggttcgccaatctgcttcccagccgcctcgcccgctccatgggagaggtgacacctgtgcccgcctccagcgctccatgcccccggataccatccgagcacgatccctccggcagaacttctgccggagaagggacgcatggttaattggttcgttctctttacgttgcaatccattcatttgtcaagaatcatcattgtgagtgccgagggttattacagattacaggatcactaatgctcttttttgcccaaaaggtgttcaacgaaatgctgcttagccaatgtattaccagaaattgatttctctgtaagtgagaatgtcatattgccatgtcccctatgttgttatttatactaatgattgcaggattctctctgttgttatttatgctaatgtaatgaaatatccaattactatgtatagactctagagctatgaactgctgggaagttgagagtgttgctaccaagcagaaagattcaaattatatgttggagcaaactaatttggatcttgcagtctcaaaactaatctggtccttgattgtttcagagcggacgaaaataaaaaatggaacgatgcagtgaagattatgtaagcaatgttcgtgatatatcgatcctgaaattctcatagatggccattgcacaaatacaaaaatttgcaggttattaatagtgaactacatctctgtaaatctgcataacatatgttaaagctagcccaagaattaatatgttgtaaatctgctctacagttgacactgcttacattttctactattaataaccctcagttgtgatagatctgataccttcttaaaaatttgaactgagttttcatacctagcagtaggactaacattttatggttgtattgttcagctcaagatgaacaaccacaccaaccccaagatcaccaactaagcctatcctgcttcatgattgttgttgcaaactccaacatgcttgctgctggtgcaatctgagccggctggtggcagatgggagcctgccctatgttgttagcagcttttttcactccaagtcatgcttgctgcctgtggtcttggtagtttcttttttgtgttgtcaatttaattattaggatttcccatgtgctcggctattggtgttcttgtatctgttttgtttcagggtgtcattactatggagtagatcataatttttttcttatttttttccaatgccttgtaaaataaccaactagcagggatgttcataaatttcccccttttgtttggtttttttcagacatatatataatgaaggcatatatacacaaaaggaggagctgtttgagggtctaaaggacaatagctcaattgactgggaagttgttgtcatatgtcgagagcaatctgctaaatgttaaagaggtgcatctaacttttgtacccagtgaactgcaaatctgcaccttctcttttgattaatagtttctttggattcagatcaaaatagctcaacatgggaatttttctagcagaggatgggcaattcttggaaaatactatatatttcttgtcgttgaatgtgatcatgtcccattattctggcacttgctgccttgattttgttgcctgtgccagccctttagctagctctctatcacacacgaatgcgtgacccttgatggttgtatgcagttgggatattttggtgagttcatcccccttccccaccccaccctctctctctctctctctaaaccatcatttatcttcactattgacttacaatttcacttctagctgatgatgatcaatcaaagctagctcatacgtattagtgagtttatgaaaaaaaaaaggatcagatattcaataacagagttagctccttcagaacgatggcaaaatggtacctttataattttacttctcaacacgcacacatttttttatgacgagtttgaacttttgttctccttgtcagattttatctgaagcaagtatcatatacttctgtattagaatatggacgcaatcatatatctcctaaggtttagtacatactctcatatttggaagtgaataccaaacgtgtctgaaatagtgcatgcgatttaatctattctctcttaggcatttattcgcaaatgcaaagatttctgtaatttggtcgtagcttagattatggcaaccttggctttgtggtttgccatgtcatgtactgatatatgaatgtgatgctttaattaacgttgaaaagccatgaattatgtattcgaacaaattgattggatgtgtcctgaaatcggttcagactttcgttctttggttactggcgtgagacgtgggagaaagacgctgaagacatcaagcataacatggagttgataaaacatcgtcgactgaatcatggaccttgtcctggatgtagtttctttggctgctggtttattacactatagtaaaactaaggaccttgtaataggctctttgtgctggtctgacgtgaagtgaaaaccttcttaatgtaacttcgctaaaattagcgttttgtctgtttaagcagtatttatggtataaagaattgcatattgcattatattgtgacaaagagtattttctgaaattttgacaatttgaccattttgaaatttttatttgaagaatagatcgtgctaaaatcttattgcaaaaatggaccgaaacttattgcaataagtttagcgtggtctattctttaaaagaattgcgtattatattatattttgacaaagagcttctgtactcagctcattaaacctgcctgcttgaactatctgatacttaagttttaattaatgtcttgaatctatacttaatagccaatcttatgattgtttcatttacgatataaatcgtcaccatagcgttaacgcgggcttgtaactatattttataattataaatatttaacatgtccaggatggtgacgagctaaggcaatttttttttgctaaatctactgatgtaccaacaaaatgagtatgaaagcaacaccctagcggtgcacgagattttttaagtgtatcgcaagtgcacaacattagaatagttatttacctatatgtagtaatttaattttgaggtgatcatcaataagaaagtcttctatctatgttgtctttttataatttaataaacgccatgagattgttttatatatgtggcagaaagtttgcactatacttctataatgataacatatttcttgctttgaaagtaatctatagaacaataatgatttgtagtttttttggattgccagattttttttccgtgttcaataaattttcactcaatgattatttaatatcttttcacttaatataatttgaaattgatatatagcatttcccgttgcaacgcacgggcaccttactagtatttctagaaaatcatgagctgcggtacgactcctatatttctaaaagcggacgaacttaaaagccaactcaaaggatatatattttcaaaagcgaacaaatttataaaccgactcatacacggatgacgtaccaaagtaccgacaaaaacatcttaaattttttaatagtagagatatatataagttataaatcatgcttaaagtattttgagtggtgaaacaactcacaacaaaataaattataattacataattttaaaataagacaaatgatcaaacgtatgacaaaaagtcaatagcattatttgttaaaaaacaaatgtagtattattttataagccaatgcatttaaaatcttaagtttaataatgaagtcatacatctatctcacatattttttaaaaaagaatctctaatttagcttttagcttaatagtgtaaaggtggcttatagcttttaaaagacaaaaaaaatatttatttgtttaggtttaaatttttcttggctgataagctcccttataagcttcaacaaagagtgcccgatttacttagtactcacgccatctcaagatataacaacttttcgccattagaatgtgttccaaaatataaccacatcaacattctctctcccaaccaatcacaacccttcgtcattcaatttcctcacatatcttcacttctcaaccaatcacaatattctcctagttgattctatctactttctttatacttgtgtccaaccttaaaagtttttatattatgggatggatgtactagaaaataaaagccttggcatgtagaactcacctaataataactcagtttgtcagcttgccgtcagcgtcagcacaaactgcttcccaaaccttaaaagaagtcgatttacattggtttttaagatagggaagactcaatcgagaggaacaactgagggagatgaaacagacttattcctaatttatttggcgcaaatagctagtccgagttcgtgatcttaattagtttttctaatgatcagcgcccccctctagtctctctagtctctactcatagtatatacgtattatatacttatatatatacatatgtataaattttatatttatatatacaaaatttatacgtgtgtatacgtacaaaatttatatataattttttatatgtatacactttattgtataaaaaatatacacacgtataaaaagtttgtgtgtacgtataagaaacgaaaaaatatatatatatataaactttgtatacatgtttaccaagtttgtgtacacacgtataaaacccccaaaaatacacttatacaaactttgtatatgtgcatacaaagtttgtatacgtatgtgtatgcaaagtttgtatttgttcatatataaagtttgcatatatatatatatatgtatatatatatattataaaacgaaagataatacgtaaagaaaaaacagaaaataagaaaaaggaaatcgtaagatacggaaagaaaaaaaaaaaaggaaaccgtgaactacggaaagaaaacaaactacgtacggaacgaaaaacagaaaaaaaaaagagaagaaaaccgttccaaaaaaaaaaaaatcacgcggtgatgctttggcagctttgctcgtttcggaagtaaagcaggccggacggtttcaatcaagaaagaaaaagaaaaagaaaaagaaaaaagaagaagaaaagcttccttctagatgcttctttggagtgaggtggggcctacatgtcaggatgatcgcctcgccacggccacgccggtttattataataaaagcatgttcatcagtttattactccattgattgagcagccggcggcggcgatctttgcttaaaccctaatctcagacgctgcctttgagagaggagaggggggagatcttcttcttcgcttacggcgggtgcaggtatcccatccaatccatcttcccctcacctctctccctctctctcttatacaggttagattggacgacattccatcaagaatgttagttaaaacaatgtcaatgatggatggatcgaataagaggaatatagattagctgcgattgaccgcgatggatcaatcaaattcaatccatcgattttttcccctcgagtattttggtggtcatcttcattcgatctggcgttcaaggccaagttttgcacttttcatcttgtctcacagatttgatcgctcaacttctcttctaaaacatcctcctttacctacctacttcctcatctccctgattttccctgcttcctctttttgccgctattcccctcccctctcctctcctctccttgcagaacttgttttttttttttaaaaaaaatcatctcccttttattttcttgtagacaagcagtgtagagccctggtgctactctgttagagccaatcttacagatcatggatggatgcgaatgctattgaccagtctcggtcaaactcaaattaatcactacatatatatatgccacaacacttgaaacaaattacttcaacttttcaaccatctatttttccctatatatgcctgtactagtatgactgcttttccttgcaaagtaattgtaacctgttctagcaactagaaacttcttttctgtctgcttagtttgccaaaggtctctttcaagcatttttttttttaaatcagagtttcttcttcctctgttttctcccttcttgtgttcactcatgctgatgtagtctggcaacttctctgcaacagacaatatggcctcagcattcgggagcacctcagcatgtggcatcaagatcactcctaccgcttttgccaccaagaaacatctttgcctggttccacccccagtcgtttcacttccccggaaaaataggcctcagaggaagtgtaatttcagagtaaatgctgccaaagagttatatttcaacaaggatgggttggctatcaagaagctgcaagtgagttgtacattctaataatttctactagcatgatgctatcatctataacatcaacttctgagttgtgacttctattttctatgacagaatggagtcaataagcttgctgatctcgttggagtcacccttggtccaaaaggacggaatgttgtccttgagagcaagtatggatcacctaaaattgtcaatgatggtgttaccgttgcaaaggaggtatgccacgtatagtaaactgttcgtgttcttatgatgcaatcctatcattgcttaaattcagagttttctgaaaaatgactgaacatttggcataaactgtttgttttcttatgatgcaatcctatcatagcttaaattcagagttttctgaaaaatgagtgaacatttggcatgcaccaggttgagctggaggaccctgttgaaaatattggagccaaattagtccggcaagctgcagccaagacaaatgatttggctggtgatgggacaacgacttctgttgtccttgctcaagggatgatcacagagggtgttaaggtacaccaatataaaagccttgtatcttaattttacagcataaatattttacttggttctgggaacaatcgtggatctgtttactttcccaggttgtggctgctggtgctaatccagtacagattacccgtggtatagagaaaacggccaaagcacttgtgagtgaactccaaaaaatgtccaaggaggtaagttatggacttctgtttaagatcttattcttttctgcaacaaatcactatactccgctagtcatgtaatgcagccaaaatagggtgtgccatacatgagatacttctatagtcctatatacaatatacaactctatgaaaaagttaacgtggttctcacttgcccatttgtaaatttgtaaatcaactggatttgtatatacgtagctaagtctaatgattttgatatgagtggtgtatagtgtgccatgtttcacgtttctttttcagtaatactaaacatgagtgctgggaatcttctgtgctgatatttaagtaacacccatttgaattcaggagcattggctgccagtttgaatcgtactcatccgctacagcactatttttgcttgaaatttgaatctatcatattgcatgcaactttgcaggttgaagacagcgaacttgctgatgttgctgcggtaagtgctggaaataactacgaaattggcaacatgatagctgaagctatgaacaaggttggacgacagggggtggtcacacttgaagaaggaaagagtgctgaaaataatctctatgttgttgagggaatgcaatttgatcgcggctatatttctccctactttgtaactgacagtgaaaaaatgtcagtggagtatgagaattgcaaggtttgatgcattctagaattcggtgtacttaaactgtgcattaaccagatactcatttgtgggctctatgcatttgatgctaatgttgattctatcacccagttgctccttgtggacaagaaaatcaacaatgccagagatcttataacaattctggaggatgctattaggggtgggtacccaatcctaatagttacggaggatattgagcaggaagctcttgcaactcttgtggtcaacaggcttaggggtgcattgaagattgctgctattaaagctcctggttttggagaacgcaagagtcaataccttgatgatattgctactcttactggaggtgatattcagcttttgacataagttgtctacactctaagccacacgtgcgcttatatatcgttcttctttcaggtactgtcatcagggaagaagttggcttgtccctagacaaagctgatagagatgttctaggaacggccgccaaggttgtagttaccaaggattcaacaacaatagttggggatggtactacccaggacgaagtaaacaaaagggtgacacaaatcaagaaccagattgaggtctgtattatttaaaattaaaaattctatgtgttcctgtacttctcgtcaaaccactcctgtattcattttctcctgaccctgctcttttttgggggtttctttgcttacatgaatttacagggcagatcttttggattcacatgtctcagtatttttttgtggatttttatacaagttattttttcttcaggttgctgaacaggaatatgagaaagaaaaactgaatgagagaatagctaagctctctggtggtgttgctgtcatccaggtgatctcgatgttctgcaattgaaccaatgcacttgttaatgtactactaggctgcatttgcagaagataattgttgtgaaatgacgctacttgttatgtaggtaggagcacagacagaaactgagcttaaggaaaagaaactgagggttgaagatgcactgaatgcaaccaaggtgaatacttctctttgttaatataatttaattttgggattgcattcagagagccttctgatgcacatagagtatatgggtttgttgtttgttacttaatagtttgctctgtggcaggcggctgttgaggaaggtattgttgttggaggtggctgtacgcttttgcggcttgcatcaaaagttgatgccattatagaaacacttgagaatgatgaacagaaggtaggaaaacaaatgaaataatctttggttattgtttcatttcatcctaggttcaaggcatttgttttctattgtcaataattaaaatttctttttggcttcaaggttggggctgaaatcgtaaggaagtccttgagttacccacttaaattaatagcaaaaaatgctggtgttaacggcagtgttgttactgagaaggtttgtactctgacatttgttcttaagtacgatgaatatgcaattctgcagctcgtgtgtaacgaatttttgaacatgtatgatttcaggtccttgccaatgataacttcaggtatggttacaatgccgctacaggaaaatatgaggatttgatggctgctggtattattgatcccaccaaggtaattttctgccgaatcaatgcgctttcttattcgtagtcacatcagaagtaattctttcattattagaatatatattgaaatgcacgtgtgcctttgtgttgtgctgtaaaattaatataaccgatttaccatgttgaaccgatagaagtgatcagctgcatgaagatgaacctctgggatatggattttctttccttgcaatcaaacaaggatgttttccaccctattttttatattagtattttgagtccataaagctaacgttgtgtgaaacaggtggtgagatgttgcttggagcatgctgcgtcggtggcgaaaacattcatcacatcagatgctgttgtggtggacatcaaggagcctgagaaagcagctgctgctgggaacccaatgggtggatcaggtacacggacctgctcatcatgatcaaacagtagtatatattgtatgcttgaacagagtttgctaattgttttttgttcaggttttggattttagtttagaagaagaggagtaccctttttggcagttggcaaccatttttacactggaggcaggcagaatttcacagttgcatctgagacgttttttcttttcctgtgtgtaattgttgcgtacgtcaatgtggcagatgagaggagtagtaggttatgaatggccagcattatgacagtttattgttgctcgaccttacagaagagctgaaacagtgcaacataatgtttttaaggttgagaattatgcaagctgaagtagttggtaataaccgggagaggattgtgttgtcgttggagtagatgatgattttactagctagttagatcgagttacaaacatataattaattaattaagggggcattggcagattacaataataaataaattatttacatgataatcgagttagcagtgatcgtgtttatatagggcctaaggaggagtatatatatgtatttagcaagaagtgggttgttagttacaggcagggcagcaggagggtggggggattgaattattattattattaggcggcggtgttgttggcgcggaggtcctcgaagctccagtcacggcggacgccgccgctgcgacggagacgaggaggagggccgccgcctttacattccatcagctgcgacgccgacgcctcctccaccgtcgatttgcacttgcgcacctgcttctgctgctgcagcatcggctgcttcttcttcttttcgtcgtcgtcgtcgtggttgctgttgctggacgacgacgtgggcgtcatgggcgccggtggtggtggatcgagcagcagcaatgcggattggggcgtcctgaccggggcgtagcgcggctgcgcgaggagtccgtcagcggtgacacctcgtttcagggcggtgcagcaggtggccgtctgcggctgacgccgcccatcgtactcgtcttcttccacgccacctcgttgccgttgcctggtcaccaggttgcacgtcaggtacgacgaaaggctcatctcgatctctatagctcctcacttgatcatctactatcacaatctctctctctctttttccatagaattttatagctcgctcaccgtcctaattttgagcggccgcccggctaatttttggatggatggatggattcacccaaattagctaattaactgattaactgatgaccaacggcatgcatgcgtcaaaacactaataatattcgcccagctaatttgagcatccgcatgtagtccactagatacacatcttgttctttctttttatcacaagtaaccacatgttttttatactctcatgtacaattgagaaaatcattctgttcaaaattgtattgtgattcatgtgtttgtttttttttgaaaggagggcaaaagctttgcctcgtatattgatagagatggggaaaatacaggacgatagaattatgtacatggctagtctaaaaaagaactaagcccgcaaaaggtgatgattaagtgatatctctcaagattccgaactcttgaagcttagaggctcctactttaactcatgcctgaccttcctcttttatcttggtgaggatggatgccggtggcgatgcagtgtttcaaaaaatttattcatttcgctcacaccatatttcctaggataccaagatcaccagagtacgcaggggaatgcggaggttgttagcgagaattgtgattcatgtgtgacatttgcggcggaaattatgatgaatttgttgtgacttagtttcatctttgcatttgttgtgcaaaactaggatgttcaaggtattttacacttaggctgtgtttgatacttggggttgggaacccaactccaccgtacggaaaacagagcagtccattagcgcgcgattaattaagtagtagctatttttttttgaaaaatggattaatttgattttttaaaacaattttcatatagaaactttttataaaaatatactatttagcagtttaaaaagcatgcacacggaaaatgaaggagatgggttgggaacctttaggaacgaacgtagccttagtcatacacgtggcgggcagggcgcgacatggggcgcccgattttactccccacgtgggcgcccgattctaggcatcatttgcatttatgtatgcatgtgcaggcttgctgcaaagatattagttctgcatatatcatcatgcagtaagtatgcattgattaatggatcatcgatcgtacacactacacagacatgcatgcatgatagtactagctagtgatatttggatatcgaattaattggtagtagtagctggtagcaatatggctagagcaaggagatgatggcgagggagatgacgccgtgctggaagaggggcttggtcctggccttgatggccggcggcgtggccatgccctgccccttgaactcgtcctcgcaggtcaccggcgcgtcggtggtggcgctcatcgccgtcttggcgtcgccgtacctccacgactcgatcgccgccacggcgttgccgaggttgtaggcggcgtcgcggaacacctccaggcacgagtcgaggcaggacctcggcggcgaccccggcggcgccctgtcgcggagcaccctggcctcggaggcgatggtggccagggcggagcggagcggcatggtggagaagagggcgaggccatggaggtcggcgcctgggtaccccgacagggacgacacgcacagggtgtagttcacgttggggttgctcctgctgcattgcccgcacgtctcctccactatatcctcgcccgccgccgccactgccgccggcgacgacgcaatgaccattattacaaacaagaagcagacgctgccgcagagagtggccatgtcgatcgaccgaccgaccttatggttagcaacgtcgacgtactaccactgcgtacaagctagctagtgtatatatgcatgcttgtgggattagttactaatcaacgtcttctagatagtacacagtacgaatagtacacatgctacacttttttttttcgaggggacaggcagggagctcctgcgattcaccgtagaagaagagagttgatccagtttataagggaaatcagacctaaaaaccttacaacagcacggttaattaaaggaaaaccggcaaaacccccgacatcgacaaactgaacctaagtacagccgtccaacaagagataaactcctaaaacgaagccttcaagaaggttacgccgacagaacggcgacatcgtccgatcctaacgaatctaggttttcacccggagaaaactcttgaagtggagttgaacgagggctccagtagcaacgccttcaagaaggtaaacggcgcccaagggcgtcgccgttgctagcaccgagagcggagcaagactttcgccttggagcacccatcaaccatagcatccacgacgggagccaccaaatgtcacctgcacaccgaggatacctgcgatattcacaccacctgcacgacgatcggactccaaccaccctgttcccacccgaggacgcgttggatctgggcaaggagccagatccggccgtcttcctctccaccaatgccggccgacgccagtggcagccgcggggtgcctgcgtgctcttgcctccgccggctgccgcgccgccgccggatccgggtgcgccaccgccggatccgcagcctccaccatcgccaccccaacgccgtcgccatccccgccgccgtcacccacaacaccacccggcgcaactcacctcgaccgccaccgtcgcccgtccccgctgccgtcgtcgtccccgccgccagcccatcccgccagatccggccggaacggcgcggatctggcggacaccgccgtcgccattccgggcggctccccaggccgcccgagcgcgaggagacgaggagcgccccgctgccgccgtccttgcggccgcgcggcttcgccggcggtcgctcgggcgacggcgaggcggagaagggggtgggggtgggggagaggggcggccgggtcgtcgcctcccgagccgctcctggggagagcgacgccgtacacatgctacacttattcttatcaacacacatgtacacctattatataagtatctctgatagattgaaccggtatatatatatatcctgagacgaagtcattataaatatctcactgtcaatgagcatatatatgttaccttgatattgacaaagttatcattgtcacatcactgtcgatgtggacgtcacctatcactgatatatcttgatattgctaaaatcatcattgacgcatcactgatcattatctaaaaaattaacgcatcacttttgacgcgtacatcacctaacattaaaaaattatttatcgtaaatatgagcacatgtgttaattctaagactattagtatacactactcaagccgttcgttctgcgagtggttagcagttatgttgcaaccgaaacctgaacagctttgctctgctctcaactaaatagtactccatctatagctctagcttcttagttgtgatatcttagttgtccttgtttagccaaatgcatcccctttaacttttaaaatggaaggatgctttccttgaatatttatatattgggtccaaaattttggattcctcgacatggatgtacgataatctccgcttgtgtttgatcaatgtgatcacttatactctcgcattagttaattgtaatgatgtgtacagtactagtactagacagcgttttgtcgacattgatacaagttcagtttctcaattaattgcatggcaaataaatattgcatttggaaccgatcgaacagactcctgcagtatatctcaaatccagatattgttttctttagaaaaaaaaaagataatccagagattatgacaacaggttattcacttcatttagtctgacgacatgcttgtaatctataaaatttccttgcactagctagtagtagcattggctcatagagatcgttcgatttcctttttcttgttgatctgaatttcttagatcgatgagcaatatttttacatttgatcattgagatcgaaaccatgcacatgtgaacatatgtaccaaatcaacaggactgaggaaaataaaaagtacacagtaaattaatcgtgttattattcattcgtctttcatctgatgaacaattaaatcctacagtacatattcaattcaatcagcaattaataataataataataataatttaagtaaaagaagaagaaattccagcggatgatcgatcgatgagaatgcaaattaataaggagtagtagaaataaaattaggcagaggcaggcaggcgatagatggaagtaaggaagaaatggaggaagattaggcggcggcgtgggtgaagccgatggcgatgtgggccatcctgccgtactccctgtcgtgggcggcgatggggatgttgccctcgtcgcccttccacgcgtcctcgcagctctcggcggcgcccagcgcggcggacagctgctccatggccgtcccgtagatgcggaccttgaggttgtccagggcgtcgcggaggaggtcggcggcgccgccgtactgctcaaggcagtgctcgaaccgtgcgcgcgcgtccgacggcgacgaagaatcctcgggctccagctccgcgaggtcgtccatcttgcagacggtgctggtggcgtggtcgatggccatacgggtggcgagcatggcgagcccgtgcaggctgcgggcctcgctgctgctgctgcgcgggtccgccgtcagcgacgccacgcagtggtcgtaggccaccgcgtggtgcgtctccgatgccccccggcacgcctcctcgatgctcatcgggctagcgcactcctccgcctcctgctcgcccgcatgcgccgccgccgcaatcatcaacatcagcacgcagcacatcatcaccacgcttctgctgctgctgctgcttctgctctccatcggatcgaatcgaatcgacatatgatcgatcgatcgatcggtctccaagctagctgcttattctgatggatcgatggctggcttggatgatcgatcgatgttaacctgtcgatcggggattgatatgatgatagtagcgtggcgtacgtccaccgatcgaggaattactggatcagccgatcgatcgaagaagacgacgacgatgatgcaaatggatggatcgtgtaattagctggctatggtaggctagatggaatatatatatatataaacacattgatgcatgtatcgatcgatggatagatgcatgcggcagctagcgcagagtgcgggctgccggagacggtggaccaacgggagtccgggacgggcgctcgctcgttcaattcgcgcgatttcttcacgtccattaattgcttatcgacttgaatacttcaactctctatctgcatgcctgcttgccgttcatccattaatatgcatccgtcacgtatatatgtacagatttactactcatacatggattttcatctctcaattgacatctacatctgcatatatatcatctaaatacttacaaaaaaacattttaaaattttgacaagataaattaattactataagatatatcatcttatcatattaattaattcgacttgtataggctgtaacaaaaagatcaaataaaactacaactaaaactagttaacatacctgcataattatatttatttattgtttttatttacaatttatagcagttgaatttgaacatgtatattaatttgtagagtaatatattttatgttaatcatttaactatttagacatgcaagaaacaaaacaatatctcctaagtaatgaaaactatccttcatattagtcaattacgcaagctaggcatgcacactcatcctttcttactttcctcctttctttaattaaagaagggttggtctttaaaaattcatccttgactatgttattgaaaaaaatcatttatggatatatgtggaacgaatacattaataaggtgtatttttttcgcgaacgcacaaaaaattgcacgtcaatatattagaagaaatagagttttagttacatagcacaacggaatggactggcccttgcaaagatacggggaagagaggggttaaaagagaaggagattaaactaaaattgttgctcctaaacagagggagaaaagcgaaagaaaaaccctatcctcccaaaagatccccaaacaaagcggcactagctaaggaccagaggcgaccctcttggaggatggaaactaacacctccaagaccggcgagaggaaagactcgaaaaccctaacactccgctccttccaaagctgccaggatacaaggaggaccagaaagtcgaaggccttgtgaaggtgctctgggaagcggccctagcaaaccgcaaacggccaccagtcctgaaaagtgtcaccacgagaagggacgagcccagtccaaccaggaggggacaggatgttgtgccagatttagcgagcgaacacacagtcgagtaggatgtggttcaccatttcaagctccttgcgcgcaaaagggatagaccgagtggttgtcaatgtcgtacttttgcaaaagctcagcagtccaacaacattgctagagtgcaaaccaaaggaactaattgcacttggcaaggcccttggcctgccacggtaagtcggtgcaaggaaagggaagttgccctaggaagaaggcatggtaggccgagcgggccgagtagcactgttcccccgtccaacgccataccagacggtctccagtgctcggagagagttggataggacacactgcattccagaccatcaggaattgggatatgaccgggacagtgaggacgccacggatatcccttacccaggagttgccagcgagggcgaaggccacattgcgcgatgccctgagacgtgggggcactacaaggagaaggtccggcgccataaaggccatagagcggccatgtatccactggtccgaccagaagagggccaacatggttttgaggtaagcccagtaggaatggccggagccagcgattaataaggtatataattgcaagctaagctgccagatgcacaaatcaattggtccagattcgtggtgacgtccatagacgatagtataaattaagacgacgccaagagaactaatcaagcgaatctcagtgcatgcatgagcgagtgcaaatattattgttcttgtcttatactactatcttacagtttaaaaagtaattgcgtgataatggcgtggaataaagctatatatgtttactctcaatcacttcactttagttgcagttttggcaaatgcgagcatccatcatcggttggttgtgatatatcccacgaccaatatagtatataatcactcttatcttcttttcattgtccacttacagtacagcagatgaaccatgcattgggatgctatatatatactaattgatcggagatagatttttgtcccaaaagatgtcccctcatttcttctatgtcgttacgtgttgtctaaatagctatgaaaaaaatagaaaaaaataattaataaaatagataaatatgaggcatatcaccgttactctataaacatgcaattaattcaacctctataagttataataaaagaacaaatctgactctaactagtacatgtactatttatggtcatatttgttctttttctaatttatataggttaaatttaaaattacatatttacggagtgatatatcacatactaatttatcttgcctttttctcaaaatattttataaccgtttaggtgacactaagaaaacaaggaaacattctatagatattttagctaattgctcttggtctttgctaaaatataataatagtattggttagaacaaactatatacttatattaatttatggtcaattataatttgagtggtgaaggtggttgctgttgggctttgatggtgttgggcgcctcttcatcatcaacaggcaggtgcttgggttcaggacaacaaaccaccaccaccaccgaggaggcagctgcagcgtccttcttcttcccccacagcagaaggtacagacctaggatcatcaacactgatcctagcacgctgccatatatcatcatatatgcaaggatgaaatcaattaattatatatcatgcatgcatatacatatatatatatatatcgtcgtcaatgcatagtactatatacatatatacctgccgaggtggagctgctcatggaggaagaagaagtcgatgaaggcaaccatgatctggatgaccgggatgaaggctgccgtgaacacagggcccctcttccccacacaccatgtcattatcaggtaccctactccagacgccatcaccccctgcatgcatgcgcccccacacaattaattcatctgtatatatgtgcatggtgatagatgtactattagcaaggcatatgtaattaattgattaattaccgagtagatgacagtgacgatctccactttgttggtgagagtccaggcggaggctgtgagcctctcggtggccagtgtgagcgccccaccctgcagcgtgctgatgaagaacatgatggccgtgcaggagtagatcgccgggtatttcttggtcagcttcccctgcagcagcagccacagcgagaagcacaggcagttccccagcagcatcaccgtccccagcgtccattgcttattgttcttcaccatcactgacccaccatgtcctcctcctgcagaagcatccatggcagcagcagctgatgggtggtttgtgagtgccacgcccttgtagaggctcagcaacagcacacctgccatggacgtgagcgtaccaaggaccttggcacctcctgccatgctcttcatgttgagggattccacccctagcgcaatggcgatgaggaaggtgagcacaggagacaagttggcgaatgttatcgcgtacgtcgccgtcgtgtactgcaacccgtagaagaagctgtactgcgacagaccagcactgcatatacatatagccatacatccctagctctgaattattatcactttaatttaattaccatacttcatcaacaaattaataaactattgcatgcatttgaacttagaattgaaagaacaaacacagtagatgattacccaagcaatgcactgaagaagaggtacacaaatatctcccatgtcatcttaggccttgtgttcctgcctcaattaattaaacatactcctattagtacaataatgaattaattctctgagagagaaacatgcaattaattgttcatgtatatatataccgttctttgaaataggcaatcggagataggaagagagtggccaccagctgccggagtgtgatgaggacaaggcgattcagaccttgttccagcgccttcttcactagcgctgtcatcaccgcagagatgaggtcgaacaccagcattgtcatcaccgtcctacactcctcagcctgcaacatcatcctagctagcctgttagtgtttagcagctagctacttctctaattaacgatatatgtgattctctcaagtctcaacaatatatgtatgtatgtaatgtgctagcttcttgctgtaagacagtaaacacactctgctcatggactatatatacccacacacacgcatgctgctgcatagatagccctgtccctccacttattgatattcctccaaaaaaaaaatgaaaaaagcgatggctctcgttcatcccgggggggaatgctaatgctatctgcatacctaattgctcctcgatctagtggaatgttactgctgaaaaattagagtatatattttatccgacaaatgacatctgagggggacactcagaatataattttcagagcaaaggcgaaagtaaaatatcctgattcaattttgggtgcccaaacatcgatctgaaaatgatgcccataaagtgaagaaaaggtgagagagcactctacttacaaaactcttgataaagtcacctcctttttgcacaatcacctggtatgtacgtggattaatcgtggactaaatacattaacttagtatcagagtcaggaatactatgaaaggatcgagccaaggaaaaggagttctcaccttgtggttgtgggtgacagctctcttcaccctcacgcagcgctacctgttcttcaactccaagtctcacatctacattgcaaccaaattaatgcatcaatccgtgcctacgaaaatagagttcacgatggatggtcactgcgtatgcatatatgcatgcatgcgtcgctttgattagacatgaccatatagaaatctgcggttcaggagtgtgcaagggccaaaagaaccggcaaaagccagttggatctgcctgcctgtccatgatgaacaggtctctacttatagttgtagcccgctactgaccgtggacagggaaagacatatttcatgtttcagcagtaagatttcagactagtaaaatgtgcacatgtacagtggcaaatcacgattatttaccatttgggtttaggttgtagaaaatctgaaagacaagtcttactgctgaaatcaacctgattgagtgattgctatatattcagtcatttgcaagatcaagttaattcttcttagagagggaaatagtctgcaatgttatccttggcattgtaaatcttttttgccaagtccttttttaaccctttcattgaggaccaatttatgtattctataagcttctatatagttactacctaattaaacacctaaaactctacattcaaacatagcaattatatatgcaagcatagtaattagtacatcctaaagcttatatagaagcacgtcacatcctaaaactcaacatataaacataccaaataatcatttctcatatcattttcacaatattttaacttaaatccatctatcaattttttttcaatatttaacacatatatccctccatcgtttatacaacatttaggatatttttatttatgtattctatagcaaagcgcgggggtgccatctagttaatctggatcataaccttcgtgctaattgctctaatgctctccacatgtctcttgcatgagtttcaagtgtgaaagttgtgtgctattctattattggcttggcaatgctactttgtttttagtgaaagttgagcatgtgagcacatatggtatgttcgaagttagttcataatgctggagttgaggaatgctatgaaaggagtgctcaccttttgtgtgtgacagctctatatattcaccctcacccaccactaccgattcttcattgtacattatattgcaaccatatatatgcatccatctgttcctatgaaactagctagaactcacaatcgacgctatccatgatgaacgggtctctgctgctgctagctaagtaaaaagacctcttttcacgtttcagcagtaagatttcagagtagttaatgtgctcctcaagtgtcattttcagtggcaaatcacgattatttaccatttcggtttaggttgtacaaaatctagaagagaagtgcttggtgcaaatcactgcacatgtgcatacgagagcactgccaaaaaagaaaaaaaaactacaatgagttatttaggatgatcttttacaccacaaagactaactactacaattgcccattttatgcttccaaattttcctttttctccccgtcttgttccactgcttttgccaataaagcagtagctgatgcttccttgctcttaccccagaggagaagatagaggcctccaatcacaagagcagcacctatcgcactgcaaagacaaaaagaaaaacaaaagtgcgacttttgatgtgtccatctgcgtaataaagttgtcttttggccgatagttccttcaatttgtaactttttagcaacacgtcaatagtttaagtgatgctagttgatagcacaatgatatcaattctagatcctttcaaagaactagtaatcactaaatttatttgcaagcgtcaagcatgagctttcaaaccatgtgctatcataaactagtccgagtgcagttgtcaagttccaaaattatatacctagtacttgtgcttattcatgtgaaggtttatccttttcatgaaggaagaagagatcaaggaaaggccgagagtagtaccttccaaggaaaatctgctcatgaaggaagaagagatcaatgagtgcagccatgatctggatgagaggcatgaagcctgcagtgaaaactgggcccttcttctcgatgcaccaggtcatcagcacataccctatccctgatacccccactccctgcaagtgcacaccaataaaaagtgcaaggtttttttctcagtggaacaccaggacactttgcactgaatctgaatcactcccacttgggaactgtcctgtcccttcctgaattcagaaattctttgcccgggcccatatatctagtaatcctatcttgtactagtgtagtgtctgctctgttacttgcgcgtgacaactatctttgaattaatttccacaaaagttaattcgtgtcctccagcaatggcatgtactgttttactgtgtcgaagaataccctctttaccattttcttttaccagaatcagattcttttgcatcccaaattcagtgatatatataggatttagttttttattgtgagcatgattaagttagcacaatcaggtaacatgtttgtgccaaaacattttggttgatgtttagaataaaattttgcagcaagtccatggcattataaccgcgattaataaaagacagacagggaaagattggtgatagggagagttatcttactgcaaaaacaacagcaatgatctgtatgtttcctcgaatcaaccacaccgaaaggcgcctttgtgttgtgagtgcaacaactcctgcttgcattgagctgaacgaggtcatgaatgcagtgctggagaagactgcagggtatttcttggtgagcttcccctgcagaagcatccataacgagaagctgatgcagtttaaaaccagcaagaccgagcctagcatccatcgctccttgctgatgctgctgctgttggaggtaataccctttgcaccgtgctcttggactgacgatgttgtgtgagtcaaggcagctcccttgtacaggcccaatagcgtcgcgccaccaacagacatgagcgttcctatgacttttgccagccccgccttgctcctcacatcaactgtttccagtctgcatagtggaaaacttttctggatagtgttttgattaagtacaaaattttgcactgtgaatgcattgcaattcctctttattggtaaaaagaatgtaaacaaagctctgaaaatggtgtcagtctgcttcatacactgatttgactggatttgggggcacggcttcacaaactaagccccacgtttggtttgatgatctattatgcgtttggtttgaccaagtttccttacaactacagtcacatttgtaaacttatttcccctactaaaggggtatttacttcttgcccttattttgacaatctttcttttgttttgataaaatctttatttaactgttgtggttctctgtactctgacaatagtttcagtcttgttaatagattgtaaggaagaaggaaataaagaagtgggggatagaagaacttactggagagggatagcaattaaaaaggtgaaaaccggagtcatgttggagaatgttgcagtcagtgttgctgtagtgtagctcaaccccagaaagaacagatactgagcacataatcccctatatacaacatgataagacaaaagagcataatcatataacctttcaactcgtttttttcagttttttattttcattgcactgggcaagagaacacgatattacaggggaaaaacaaagagagcaagtttacccaagcaatgcgctcatgaacatgtaggcaaagatctctgttgtaaatcttggtcttgtattcctggaatcatttatagaaaaaaaaattatgcaagagaacttagagtgacatctttgcaggtattggaacagttccttacatttatataaaaggcatcagagggctcccaatttcacatttttcacttagaaaaatgcaaaggattcgtactaaaagctaaggtccggctagacattttgaagactacgagcgcactagtggtccagccaactagaccagtataccaggaaaaaatagctgagatgcagctcagctccataacaaccaatcacacaacctccaagcttcataccttaagaactactgtaacaccctatataacaagccatttgaaacatgaagaaagagatagttttgaagttcgaaaatatcacacgtaaccccacattggattggcaacagctctcgataaaaattgaagagttactgaaagatcattgaatgatgtatcaccatcggagtttcaaatactttggactagtaactactagaaatgcgaatgatataacaagaggtatctctcatctttcatgcgcttgcatgcacattgttaccaggtactaaacatcatcataaacaaactttgcacaagaaattcagaacctgataagacacttgagatcagattacttgtcacaaacctttctttgaaataagcaatcggagcgagcaggactgccgctacaaactggcgtagggtgataaagacaacgtggtttaacccatcagccaaagccttcttgaccaatgctgtcatcagcgcgaagagcgtgtcaaacaccagcattgcgactacgggcttcagaaactccacccaattcattctctgtgtctgcactgaacagctgaagcctgaaggggtggattaggtaagcctagagtgcctagtccccctatagcaagcttgcttatattacacagtttggctgcaggtggaacaaggcaatgccacacatgtagctatcttgaatggaacattttgattcggtctcaggtcattaggtaactagttcatatacaaacatttgtacatggatgaggtagcaatgcaataggttggcaagcagagcaccgctttgttgatgcagcaacagaagcctcctcacggaacagtggaacaaccgaacaagcaagctatatatgcatgatcggattgcgtgacctgaggaatattggtacaaagtgcatgaatactgactggttctagtgtcattcagctgatgttggggtaagaacaaagggcgatgaattgttccttgagagcatgagcattagatgctaacctgtagccattgctgaagcattacacggcctagcatagcagctactcaatcaagtcagtccattgacatcgtcaggtacgctctctttttgtcctgccgccaagggaagaagaagagtgttagtgatagagatgccagcgatctagtcaagaataagtacttgattttgtatatgttttccagacaagggaatacatgccagtatcagaccatatatctaccaatatattttgtcctatgctgctacgtatcgtgtacttttctcacactgatgtaccagcagcattccgttcgtccatccaattctgcacaacatatagcactgatgattccgcaatctcaggttgagattgtcgaattgctctttattttgcgtcttgacatgacgatcacggagtacatgtgatctcatggatttcctttgcatatttcttcctcatgcacgtacactagtagtatatctcaggcaaagcatcaaatatgttgccaggtgtcgaccacaagagtcccagcaagcgctgctcttgttcaagctgcacacttaaaagcgctactacctccatcccaatatccaatataaatgcaacatgcatatgcgatatatcttagagctacgaatctaaaccgagagaatactatttaaaacaaacgattttacagctaacttgatcacagcactggcaaggcaaaccatggaacattaggaattcaggctgcagcagaaccaacgagggcgagataataataacccaagttgcaggttctttcaacggtgtaaaaaagatccatcaagagaaataagcacagaaacattctcacaaacaatacggataccataggagcacatgctccaattacataataacatcctaacccagtagtacaaaatttcattgtcgaatgaccttgtaatttgactcaaaaacagagcagtaaaagttccttgtgcactctctctaggacaggttttgctacagctagtaaggaaacgcagctcactggtcctcagtgatggtgcccttgtcactgacatagatgccatccaggaacttcctgatatccttgttcttgacgtggcatttctgttgggagcaaaaaggaaatagacatggtttaggacagagatcaactaagcatcaggtagtaaagacacctaacaagatgagactcgtgcagcacagagtagcaaagatatcaccccacctattggtgatttaagtcaagtaggagcagaatcttaacactgttgttatacatccaactagcatggtggcctgtgcaaattgcgcgcctagcatcattatattttctatcatataatagcatatatgttttctcattatattattcaaatatattaaaatgacaacataattttaaattttgcaatatgtgtaatattcatattatattttatatacatgttagttattaattatttttaatatcaaattttagttatttgtaaattgtatatattcctatatggactctagactcgtcttttaatatttcctttttttaattccgaattttctgtaaattgtatttctatatagactctatgctcttcttccaatattatttatttttatttctgaattttcatattatattttatatacttgttagttattaatatcaaattttagttatttgtaaattatatatattcctatatggactctagactcgtcttttaatatttcttttttaaattccgaactttttgtaaattgtatttctatatgcttttttttcaatattatttatttttatttctgaatttttattatttctaattgtatttctatgtggactctaaactcatctttcaatattcttcaatttttaatttcgaatttcagttactaataaattgtattcttatattgaccttaaactcttcttcccatatttttcttaatttcgaattttagttatttgtaaattgtattttttatacagactctagactctacttttaattttattatgtttattccaaattttagttagttttaaattcctatatggactctatactctacttctagtatttcttttttaaattccgaatttctatttttttttcttaattgtatttctatatggactctatcctctacttctaatattccttatttttaatttcaaatttctattatttcctaattgtatttctatatggactctatactctacttctaatatttcttgtttttaattccgaatttcagttatttcctaattgtatttctatatggactctatactctacttataatattccttatttttaattccgaatttcaattattttctaattgtatttctatatggactctagtctcttcttctaatattccttattttttaattccgaatttcagttatttcctaattgtatttctatatggactatagtctcctcttctaatattccttatttttttattcccaatttcagctatttctaaattgtatttctatatggactctgctttttctttttctctgattaatgtgagaatttctaagccatgagagagaacgtggaagctcctttttctattcctttaattatataatagatagatttgggaagcatgaacaaactctaagaaatatacagaatcttaaagcatatgcacacagaacacctactccattatacagcagcaaattaaagtagtaacagtctgacataacgaagcattgtgatttacaggatcatcatagcacacattcacagagctaagagagacaggggtgcaagaaatctaacctggttgatcagtgccgcagaacgggagacaagctcgatatcattgccatcaaggaccagctcatccttgaccttctcagaacgcaaaattgtcacaccctcaagcatgtccactttcctcacctattattgaaggaaacgaaggatgtcataacattttttattatctgtggtttccaagctatatactgaatgaatgtgacagcagattgggaaaaaaacaatgttgaaggccagagaatgatttgcttttctagagtctaaaccacatgtctatgttgtgtagaacaaatatgagaaatattgaagcatggcagaaatgatgtatgtgcaagtgatccctaataatgtgtttttaacagaagaatcagcattttgtgttgcaagactaactagagcagaaatccgaagctgaatgtaggctaaacaggcaatctgtgaggcataaattaaatatttgcagctactagttgagatgaatcaatagaggcgtgtaatcgtggagtggagaaaatacattgcgcgtaggatgaaatcatgtacgtgctggtagatggtaatagaaagaaagggaaaggggtaatgggggggaccttcttctcgccgaggaagttcctgatctcgatggcggtgttggagttggtgatggaggcgttgatggggaaatgggcatagacgaagcgcatcttgtagcggtagcccttggtgacgccggtgatgaggttctggacgtgggagatggcggtgcggatggcggccatggtgcggcgggtgccgaaccacgcgtccacctgcagcttcctcaccccctccacctccagcagctggaagtccaggttcaggtgcttgaagttgcgcgtcagcttcccacggggaccctccaccgtcaccaccttcgccgccacgtgcaccgtcacccccgacgggatctccatcgtctccgaagccaagatcgtcttcatctctcgctctctctctctctctctctctctctctctctccctctccggcggcggcggcgatgcggggcgtggaagaagaaggaagaaggagacgagtggcgttttccgctttatataggtgggtgacgcacacggccttagggtttttgccatattgggcctaggctttctggtgggccgttcaatgatgatggatgggcccaatcaacacgctcgcgacttgtagattgtaatgcagcagcccagtcattttaattcacatgcgcatatataataaataaatgggacactaaagttgtcaaaatacagcagaaaatgggaaaccactttatagtcgacgaatcgtcagtataatatctacatgcatctcatcagatgagatcagatcgagtacaacaagatggcgtatgcaggttgcgcatgcatgcatgaaaatcgagataaaaagggattaattaattattaacatatatatatccatcagtagacttccacattccattgctccgacttcttcagctgcttcttgtagtcaagccagtcgatgcctacatacagtatataatgcaagaaagaaagtaattaggaatcgaatagagatggagattaaaagaagtactagtacagtaccgtcttttgcagcgaggtcgatcatgatgtcgtcgatgcctttctccatgcccttgaggccgcacatgtagacgtaggtgttgtccttcttgagcagctcccacagctcgtccttgtactccgccatccgcgtctggatgtacatcttctcccccgccgcgttcgtctgctcccggctcaccgcgaagtccagccggaacctctccggcgcgatctccttcatccgctcgaactcctccctgtacagcagcgtgctgctggtgggcaccccgaggaagagccacgccaggccgttgaacttgtagtcgtcgtgctcctcgaagaacatcttccacaggaaggacctgaagggcgcgatgccggtgccggtgcccagcatgatgatggtggcgttggggtccttgggcatcagcatctccttccccactggccccgtgatcttcacgtccgaaccaggcttcaggtcacctaaattatactccattaattagcacacaagtacaatctaactgctattacatgatcagactcctagcttacagaggaagttggagcagactcctttgacgatctctccctgatcgttggtgtacaccagcctcttcacgcacagcgatacctgatcgatcgatcagggacgatgtcgatgttagttagctcatgtcttgtggttgagatcgatggagcaagaaaaacactactagctagttaccgtcttggagtcggcgaagtccccgatggcgctgctggcgatggagtagaggcggagcttgtggggcttgccgttcttgtcgatgccgtcggggatgacgccgatggactgcccctcgcggtaggggatctcgccgtcggtgctgaacaccatgtgccacgtctcaccgggggcgtcgtcgccggtgatcctcgtgttcaggaggcaccgccccgtgtacggctccttgggcctgtacttgttcgtcaccacgccatccacctgcttcttcgacaccttctccaccttagtagtcacctccgcagccggcgctgcggtcgtctccgtcgtcgacgcctgcgcccgcacgccattaccgctgcttcgcttggaccagcaacgaggagggtagaatacggagcaggtcgacggcctcggagctcccccggctacggcggcgccagctttgctacagggcagcgacgacactgtgttcacggcggccatgtctgtgtgcctgtgactcgcgacaaaggaaggagaggagaggagaggagaggagaggattgtagtaattgagattggaaaagagagagagaggattggattgagtggaagagaaagcaggtgacgagcttgtggtgcccgtgcgcgcctccctccctccatctacttagtactagtactattcgatcatgggccacccaattttagcctagcaataagttcactttgggtccctctatttgtcgcacagtccgattttcgtcccttgaccgtaaaaccggatacgacccgtcccccaacttacgaaaaccgggcaaacaaggtccctcagcggttttggctgacgtggcacctacgtggctaatttaactcggtattcatctgacgtagcgcttacgcggcaattcgatccggaaaaataataaagcacgtgggacccacatgtcattttcacacatcaaataataaaaataaaagtgggaccacgtgggccccacatgtcatacccccccttatcttcttcctcctccctttccatctcccctctctccatctctctcccctcctctctccagcctccaggcgccacggctcacggggtcacagggaggtccggcggtggcggcaggcgacgcgacagccaccgcctgcggcgagctccacctctcggcgcataggtgatagggccggccttttgtttatgggccttttctcttattctgtctacttccattctgatgaatattctaagcagatgaagttacatattcagtacattacgattttatttttttttaaaaaaatgttaataaatgctaccctccgtattttaatgtatgacgtcgttgattttttaaccaacgtttgaccactcgtcttattcaaattttttatgcaaatataaaaatacttatgtcatgcttaaagatcatttgatgataaatcaaatcacaataaaataaattataattacataaatttttttttaaataagacgaaaggtcaaacgtttgtcaaaaagtcaacggcgtcatatatatattaaagtacggagggagtataatagtaaaacatctaccaataggcaagcaaccgataagttttgaaatttaaacagagaaagactcacggttacaggacaagtctctatctccctcttaaccatatccaactaaagtactccgtatcaaatacaaacatctatatgaactagtatgtaactaattaatgtctatatgaactacaccattcaaaagtagaatataacatctctagctactgattttaacggcccctttgatttgtaggaaaaatgtaggaattttggaggatttcaatcctatggaaaaaaatccaatgaaggcctttgaaacaaaggattgaatcctatccaatcctttaaaattcatatagaatgtgtaatcctatgcacattttggagaaaagttagcaagaggtctaacctcttggaacatttcctctgagtctctctctctctcatctgattcctgcgtttttcctgtgttccaatcaaacagtcattcctgtgtttttcctgtgttttgcaatcctctattttacaattgtattcctgtcagaatcttgtgtttttcctattcctctgttttttcattcttacgatttaaagggcccttagaattcctatgaatttaagagtgtagcactactacttataaaatcatgctcctttcgtatgaaagcatcaaagaccaagaatatatatagccctttagaagacaagaggatgacatgtatttggttagacgatttttttggttgttgaaaactgcactacattattacggcaccgccaaattactaagatttcactttaactgagagaacaactctacattacatgtatgatttcttttttagttttagcaacttgtaaacatttatgtacctacaagtctactaactaaagaagctgacctcgtgttaataattagaaagattttacgattggtgaattatcataatcgtgcagaattattattgtttaaacatgcatggtagacgcttgtgcacaaactcatccgatgttgtgtcctcgccggaggagcttcacggtgatggtggggtggctgcagagcacactaggagccgccatcgccgtcgtgtctggcccccggcggcatggacgggtgcccttcgccacccacgtacgtggcggcgccccgtgcagctggatactttgcttttctgcctgacaagctggagcatttccagaccaacacagcagtatgcattccgtcatcatcactacgtcagctcttaaccattcaactggactagtagatgataaattctttgtcaaggcaagcttggcacaaactaaattgacacaaacaccaatagctagtagtatgtttcggggatcggccactatcgccgtatctgtacaagcttttaatcggcaatcatacagagcatgcaaattttaaccctagttaggggctcataacacaaatccaacagatagactagccaaaattttcttccaccgcgctacttgacttgatacgcttaaacaacaaagtaatcaaatcagatcaaaaatgatattgcatgatacacaagtcacacattgctagctgtggggaatgtccagggcactggaatcaccgagcaccttacgagcgcgccagtatatagcatttgctgtttctgatgttcccaactgcccatgtgcattttcaatgtaatgtcagcaaataaaatacagataaggaacttaatcacgattaaaagaacaatcggatgaggaaacaagcgatatggatctcaccttcagctccatgttgtagtagttcctccaaagttctctttcctggggatagagatcgagcgctgcatcatacagcttacgagcattcacaaggctgtcttggtttccgattgatgcaaggtttgtttccaactctatgcagtactggaagaacttgaagcttggacgtggtaaagccagaaatctgcatcgatgcagaggtgtcagaaacatgcttactcaaacaatacatatgaattgattcccgcacatgtttctagaagaatctatgtgcacttatagttcatacacaaaaggcagaatctgaaacatggaatgtgcaatgaaaattcatagcacgcttcgctcagtttcaaagacaacactacttgcctaatagacaaaaactccaaatcttgcagcaaagcaaattcaattcatgcaatgaacaatattacagtgatatttcattcaaggaccataaagttcatacctcttatacatctttctagcttgcttgataccatctctttgtaaaatccatccaacaatagcagaagaaaccgaagctccacaatcatttccaccagcagaacttaatgataacattgcacatttcaccagcttttcgaaataaaccttctcatgagaaaacaatttcatggcctgaaatgaattacaacaagcttttgaacaaatatgcaacgaagtaatgcattgtgcccattacagatagtagaaattagtacaagcagtcaaacacattaatacatccatggaactattatataaatacattgcatcgttaaaggtaaaagaaacaaatcaacaaaagaaaagatgaaccataatcacagtgaaaatagaggagcagaataaaactttgtgaaacaagttcagagataacacatgagagtaaaagagatcgagaagggtctataccgtgtgccacaattcctcagcctcaggtatgggtaactttggaagtgcaacattaaatagatcaaatagagaactcaagttctccttgctgaacgaagaaatgccagtagaagtagcaagtgacttcatctcaatagatgctctcaggttccacaaatccgcagcatgtgaaagaggaccattgcagagctttttggcaagattcctagcttcctctaatcttccaggtgcctcctccaaacctccaagtctcaaataaagagacacatattggcaagcaagatcttcagtaagacaaccgcttgattcggcattttgatagactttcagtatacatgaagtgaaccctgaagcatcaaattcaccgccatgaaacaatgagatggaatcttctgtatcagcaaacagaacacccatccaaaattttgcatacagggaatacattctggaagttggcaacctcctgacagcttcatcatacacctacaatacaaaaaacgtagtttgaaatgtttaaatattgagtttgattattcgtaagtctagggcaggttgcattaatcaacaaccttttttttctcccaaagaaagcaggcaagattgagtgacagataaaaataaccaaataatgagtttttacctgtattgatttattcagtttatttgataaagcttccattctattcaaattactggaactagttgagtcactaagctgaagcctagcaagccaatcccagtagtcctcactgtcagagaactctttcttcaggtcatccatgacctctaccttcagttcgtcagaatgtgctaggtcaacactactcaatatctctaagaatttcttccgcaaggttaagcttgaaggaagagcttttgtagcaccatggtatatggtttgaatgattagcagcccttgctgccagaataggtcttccttcccctccaaagcaactccctgtgagccagactccttgggaccttcatcttgttcattcagtgacatgaacagttctttattttcctctttccaagtgcttgcatcattattcttcttttgcagtgtcttcacatcctctccaagagcaacctttcgagccttaagcttgttaagataggtaagctccatgcgaagatactcaatccacatatcctctgattctggacaagatctaagaccagtctgcataagagcacgtgctgcagcaacatttaagttctgatcaaattcccatgctgctgcatagatccagagcccaggaaccttggggtggtaacgaatagcttgtgccagagcctgaaaaataatacaatgaacatgagatatgtaaatttagtaaatagtgagatcaattcaatgttagccttccaaaaatatatatacgcatgtttacatatcatcggaggagaagttcaaacaaaaaaggcatgaaatggggcacataaatacacaacaaaagaaggacaaacaggcatcaactcatactaagatttaaaatgaaatctacatccaagaaccaaaaaaaagaaaagaaaagtttcatctctaaatagctttcaagctctggccacattatatatttgcaaaaggaaaaaaaacacaatttcaaaaacttcaaaagctccaaccttttgccagttatgactatatttctatgcatactgagtagccttcggaacacaatcagatctcaaacaagtacacactggactggggaagtccttattctttcttagctcgaatgttgtgaaaacttaaacaactaattccatatgaaacataaaaccaatcgcttacactacagcttttctgtcttacccttcaataggttaatgactggtatttaacgtttaccggatctggactggtgagcattgaacgatttcttttttctatggcttaccatgtccccaccgccgccttaacaaacagtgcacaacacaacagctccagtgatagctggatgcggggtctgtttagtggcagcactgtagtgtaatctcataccgttttcgcgacgcatagccagtgacaccagtgcagcctatgtcatattcaggattgcgcggtaatctaccatgaaccagacaatggttattcggtgtaaaaagcccaggaaaaaaaataaatttcaacaataagtggggtcatgactttattatcttcagcattcaactatttatagcgtattatttctgatgcacaaccagaagttcatgtgaaattgtcaagtaatctataaatttctatcagcaagacgtatggcctaacttgctgcccgataatcacaatgtgagtcatgcgacttcactcaatgccaaacttaaattcagagcacaagaaggcttcaaccgtaataaaattcttattgatcaaacagagacaaagagatgaaatgaacctatgcattcataaataagtgaataaagttggttgcccgtgtccctcactcactacggtgtggccaagaaatgaaagggcgacatatagtaatcagtactaaaccattgctacatcaatcaagagccgcatgtagaaaagctaacaaaattgattgaacaaggcaatgccgcagtatcatacatagtatggagaaagaagtaatgggcaggatgagacaggaaggtgggaaggttctggggagacttgcctgcttcatccgaccatggcgcttgtcgcgacagaactcgaggtaacggaaccagaggtcgaggtcccccttgtacctgacggtggccatcctgtagatgtcgaggacgcggaggactccggcgatgtcggagacggacttcttccacttcttggccttgcccttgttcctcttcttcttcttcttcttgctgctgtcgttgtcggtggcgtcagcatcgtggtcggtggtgtcgggggtggcgcgtatgatggcgcgcttgcggaggtcgcggagggcgtcgaggcggagctcgtaggcgatgtagtcgaggaagtcggagcggagcggggagcggcgtcggaggcggaactcgaagtcgcggcggcggcggacgacctcggcgagctcggcgcgggtgaagaggccccggcgctcgaggtcgtcgagctcgtcggacatccgctcgaggcggtactgcacggcgtccgccatggtgatgtcccggctgccggcggcggggaaggaagggtagactggggttttagggtttttgcgtgtgagcgcctccgcccgcgagggaggaaggaaagatgtcaccttctattcttctacatgggctgggctgggccagaactggactgtagcttccttacgcacaactgtagcatacgtgcaggcccgttagaatgaagtcattgcaactccctcaactattgacccagtctaattcgtacccctccaccgcaaaactagggtgacgcctcggctcgaattttttttatttatactttttttattaaaatatttacaaaaataattttttgtttcgaaaatttacaaatctaattgcctgccgcccttaagaagggcgatttttaaaaatcgccctctcaaagggcggcaagggacctaaatacaaaatttttatttgtgttcaaacccttcccaccggttttaattgcttaaaaactaataatgcttattcgatactccaaatgattttaaatggaaaagtgataaactacaaagttatagatctcatcaagatctacaactttatataaagtttatctccatccaatgtcgtttgaaatgtagatctgagattttttaaaatgtgttatatattttgtaacgaatatttagatatctaaaacatcttaaatgaaaaagttattaactacaaagttgtagatctccttgagctctacaattttgatataaagttttatttcatctgactttatataatataattttaaattgtaaaattatagagctaacaagttatgctggaaaatttacatttaggtcccttgccgccctgtggaagggcgatttttaaaaatcgccctcccaaagggcggcaggcgattagatttgtaaattttcgaaacaacaaattatttttgtaaatattttaataaaaaaaagtataaataaaaaaaattccctcggctcgggcgcccgatgcaaacgggttaaaattgacgtcagcgcccgatttacgtgtaaaactactttaaactgatttttctcttaaattacttatccaaatcatgatccgattgcaccattaaattcattgcaattaaatctttaaaacaagaccacgcatggatatatcctgacgaaaaaaaataagcttattattgaattatttttaaatgttgcacgatgttccaccaggtatatcgaaattgtttcacaaagtagatcgaaaatgtttcactcgtttaaatcgggtgttgtttcaccttatataaaaacaatgtttcagcaaatagcgaaagaatgtttcagttaactgcaacattagatctatacatagtgaaacaatgtgagtacactaggtgaaacatttttcggtggaacagaaaataacaaaatatgtgggttttttgttgcaatggaatatttcaattcactgtaacattagatttatacatagcgaaacattgtgagtacattaggtgaaacatttttggtggaacaaaaaataagccaaattcccttaatagagagtttccaaaatatttgggtttttgttgcaatggaatgtttcgttcactgcaacattaaatctatacatagtgaaacattgtgaggacactaggtgaaacatctttttgtggagaaaggggagggagaagtgggtggggcccaacagggtcacgtggggggagagcgaacgtgggggagcgcccgatccggctccccctgcgccggtcgcccgggattgagcaattccgcaaaactagataccccgtagctcgctttcccaagtattaaaaaactatatacaaaacaaatccatggctgttttagggtggttttggcttaattacatgatgtccatatgacaacccagtataaaaaaaagttttaaaaaatagacttgaggcccacatataagtgataaggagaaaaataaaaaatattgattgctagcctacaagtgtctaggaaataaatatacataaggacaaggtatttccacacaaatcaatcattttatcttatcgaattagtgcagtctgttggtacttactttatatggttataacaacatttagagctcgttttatacactggattgagaaaacaaaacgaataagaaaaacacaaaatcttgatagaattgtaattgcaaaacatggaaaaatacatgaatggtcatttcaataaaccgtatgagaaacacaggaaaccagaagagagagatatgctcgaagaaagctttccaaggggtttgagttctttctaacttttctccaaactttacatgcatttagccctttcttaggaattttatagcatttggaaagctctaatccattagtttcaaatgaccaaaaaggaaaaagtcctatataatttggatcctacaaaactcctccacaaatctgtgtgctctctatgcgtgtcctctaggtgtaacatctaatatgtatccatgctagctacattctatttttgtcccacaatataagaaatttggcgatgcatttgttagtcaaaatctcttactacctctgtttcaggttataagactttctagcattgcccacattcatatagatactaatgaatctagacacacatatatgtctagattcattaacatatatatgaatgtgggcaatgttagaaagtcttataatatgaaacggaggaagtatattataggatactgttagtatgagataaacactgtataatcatcaaataggttttgtgggatctaggaaacctgcactttgaaagcttgaagtaatgttattgggtgcatatatctagtattttatctccaaaagtttattgtctggtagcatagttttgttaagggatccaattggaccaagtggatcctccctactttttaaagaaatagtttctaacctcgtgatcggcttttaaagagacctacttgtgttaccttaggttagttagggtgggtgagtttccaatatgatttttttatgataagggccacacctccctttcccatctccctagttttcttgccccttgtttgtttctctaaagggacaaggaagcatgaatggttaatatactcaacacgtcatttcttcttttagacgccacggcgcgctcatcaaaaccattagtctcggtttagaccttacttgattaattcaacgataaagctaaccatgagagttggtttgcactatatttttatggagctaggaaactgaaacaggatcaacttgcaagcaggaaagcagaacaaggatggatattattgctagtttgaagtaggataggtgtggaatctgacaaatcaggcagatgtgtgatcttttttctttgaaaaataatgaaaaaggagggggaaagaaaaatcagattttggttggctcgccctccgtctcaaaaaaagacaaaccctggtttccgtgtccaacatttgatcgtccgtcttatttgaaaaaattatgaaaaaaattaaaaagacaagtcacgcataaaatattaatcatgttttatcatctaacaacaatgaaaatacgaattataaaaaaaattcatataagacagacagtcaaaattggacacggaaatccagggtttgtcttttttttttacggagggagtacgaggctcggtctgcaagatggtccacgtggaggtccccaccgcggcttttgatggcggtgggcccaggtcttccacgtgtcggcgcatgagtggatgtgtccgtacgaggccacctggtcctcgtacgaacgggcaagcgcaagcaagtagtgtgtcgacacgtggagccagtggtagaaacacaagcgtcgtgctcccttcatttctcactcaaattaagcagctcacttgcacgatgatcggtgcccccaaactagtataagtacaactatagtgtagcacaaacgcattttctatgcagggctgtctacatatatcattgatgcacatctctgcatctaacatgcattaccgtatatggagtacttcttttgagacgtcacacatgatatgttaattctacacatcatgatcattctgtttcttcaagcaccagtacatgcaagattttcctagacaccaaaccattttgtttccaaacggaccataagtgcaaccgcacaggaaaatgaggaacgggctctgggccgtcgcttgcacaggaaaatcaatttttgtgtgcggttcacttaacagtctcgcacacaaaaataagccgcttgcgggcttgctaattaagtgatccactcacgaaaatagcctaacccacgcgctgcccaacctcccatctccctcttatcctccttcccgtcctccccatcatgcgcgctaccattattcctcccatcctccctcctgtccatcgtcccatcctccctctcctcctccccatccttcctctcctcctcggtgacggcagcgccctcggttagggcagcggagatggcggcatcggcgggcgtggccacgacggcggcattggcgggcgcggcagccgcgacatcggcgagcgcggcggtggcggcggagcagatccgtctctggccgccgcgtggaggcggatccgtcgccggccgccgcggggaggccggatcagcggcctgccaccgctgggacaacgactcgacgacgccggtggccagcctacgacgtcctcgtcggcgacggcgttcctctgcgcccactgcgtgaccacgcggtacccggacatctgctatgactctctcctcccctacgcctccaagttctagatctgtggccggtggggaggccggatccgtcgccggcgaccgcagatggtggtggcggcgacgacgacgacgggcctcgagcaaggcagcatcgtcggcggtggcggtgttgacggcagctaggttagggtttgcgggtggattttaatttttttttgttttgtttttttattttcccgtgtgggcggtctaagcgcccgcacgcgaaaatcgattttcgcgtgcgggtgcgtcacccgcacgaaaaaatcgggattttcgcagacgcacccttccagacgggtggaagctccgcacgcgaaaatctattctatccgcacggaaaaatctttcatgtggttattgtcgcttttggtgttatccatcttgaattataattttactgtgcattatatacattgatagtctctatggtttgcacacgccaattagcagacaagtagacgagcagtttccaatgttgcgtcacacatcgatccctacagctagctcgattatattggcttgtgtttgtaatggtaccgcttggttttaccatgcatgcatggttggtgtcaatggtgataccactctggtgaccgtgtcactgctaggtccggtaaccctttcctcacagtaaccaacgcttgtttgttggtgaaaaccactgtaaaatccaccaaacaattactccctccttccctaaatgtttgacaccgttgatttttttaaacatatttgaccgttcgttttattgaaaaacttttgtgatttatgtaaaactatatgtatacataaaagtatatttaacaataaatcaaatgatagaaaaataattaacaattacttaaattttttaaataagacgaacggtcaaacatttttaaaaaagtcaacggcgtcaaacattttgggatggaggtagtaatatatatgaatattttgctagctactccatctgtttcaaaatgtttgacactattgactttttagcatatgtttgaccgttcgtcttattaaaaaaaatttgtgaaatatgtaaaactatatgtgtatataaaagtatatttaacaatgaatcaaatgatatgaaaaaaataaataattgcttaaattttttaaataagacgaatggtcaaacacatactaaaaagtcaacggtgtcaaatattttgaaacggagggagtatatgggatccaccacatgattaattggctccgcgcactatcataaatacatgctccatatgtcactcgatcttagtaattagattgtttaatttgattgcaacaagtcgacaaatactatcggctgaatagttatagttaagagtggtgttggtgtggcaagtaagctagctctcgtcccacggcaacttgtatgtaaaataagaaaaacaaaatagagcagttcaattagtatttaagaattcatactataataactaataagtttaaaaaggctggttacaacttacctagtgtttaacttaattattttgacctttcatatatgtacctgaactgagcaaatatattatggtatgggcatttaatttcatttatataggacacgattcattttgcacatacgtacagtatgtactccttgaccgctacacttaccatccttcatgtcttgtctagttgccttaattaattatcacaacagttaaccttttaaaatttgttttgtggtaaacaaaataaataacaatgaattagttgaagattatcatatataaaataaggttgcttggtattgtatattggtatggtgtagcgccgctccacttgattttaactcatcaccaaagtgttatctctatacatgtgtaaggtattttccagaccatctttccgtctctaagccttacaagctaggatttactgaactaagagaaaaagaaaatgactacaaaattaggatgactatagccatcatccactactatataaaaattgtgacagcgtctcttgagagaaaaccataaactgcggcgccttatttacgataaaaactagcggtttacggtgtaccacaagaaagatcgtacaggcgcaaccaaaaatggtaaaataaaaataggaaaaatgggaaaggggcatatggggtgaagggtgatgatggcaaccaggtgttggcagtataattgtggtcccgagtcatccttggagcctttcctttctaagtaacaaattaacctctctcctctttctttctttctttctttctttctttctttctttcttgctctcatctagagtaccctttttttattataattataagaagagaaattaagctgatgtgatttgtctgccccggccacaaatccattcatcgatctatggactaccagctgcagctaggctagatccatccatcagctgggtagctgagagttgagttgaagaagcacaagaggctaggtagctcatggcggcggcggctgcaggcatgggcggcggaggaggggtgcagcatcaggagacgacgacgacagtggtgcaggtagcggcggaggcgagtcggaagaaggtggaggtgagatctgcagggcggcgcgggcggcgggagatgcggcggatcgaggacgcgacgagcaggcaggtgacgttctcgaagcgccggagtgggctgctgaagaaggcgttcgagctgtcggtgctctgcgacgccgaggttgctctcatcgtcttctcccctcgcggccgcctctaccagttcgcttctgcctcctccgagtaattaaccttttctttctttcacatccatctacttacttacttactttatttactccacttaattaatttgttattactactcctaattaatactccagtactatacatgcatgcatgcgagcatgaaatatattcggagtattttcgattttattgatccgtacatatgttcatatagcaaacacatacgtgtacttcttcgtgtactgtgtagacgataatggccgccccctcgctgcctaaatatattttcttttcttgagctcttctatctatattgaaaaaggaggaaaacagtacatatgtacttcttatcgattgtacttatctatacgtacatgtacgtagatgtattacgacttcttaattttaactagtactagtaggagtggacatatatatatctatgtatatgcagactaatgaactaaaggctaagtcatggtcgaaattaccatcacatatataataactaattaaagagatgaattgaagtttatgtatataatggtcccttctgttagctttccattttggtttaaatccactcattgatactccttagctccattgatcctaatatatagatcaaacatatcacaaatatttttcttagatatttcataatataaacacacacatatatatatatatatacatgcaattaactagcacacatcccctcccctgaatttgtttatctttaaatcctctaccctcaaagtctctccaatctcacttagtgcatgtacgacgatttttttaagaaaatgtactgtgcgattttgttccaattaatgtaggagtattatacgtagaactatacgtacatcggcgtgtcaaccgtatatatatggcgtgcggttacttgttagcaatgtctgcaaaccctcaaccataattaaaacgacacacagtttaacttccgtgttattaattagttttaacatcccaacacaaataatagatgaactctgttattagtttaaagggagtaagtgaactagaagtagaagtccgattgtctttgtaaaaaaaacaaattaaagtacttattccgttccaaaatataaagattttatagttgtttaacaaataataatattaggtcaaaagattctctttcattcacttaagctgtcaatttttaaacagcttatagataatccctttaaaaccatatgactgtctgtgtaatcattaaatgatggaagttataaaatcagtgtggaaatccttaaattgcgatacaaaatttgaacctataaattgaacttcttatattttggaaccgagaaagtaacaaaagagacttgtctttgcagatgatcccaaaataaatcaacttcttctagagtttaaatttgtcccaaaataaatcaatttctaccttcttacctactacctatccgcaaaacgagaaattttattacttcaatacccctcacctacccatcattcaatacaacatccacattaattaagggcattgtggtcttttgtttccctccttaaaagcttattggaaagttagggtttgagttatttagggacagagagagtacatacataaataagtatatgtaaaaaatccatgaaatacagtgagcatgctgggagtacatgctgattatgttgttcccttttgcattgactagctacctcatacttccttcgcctcaaaataaacaaatctcgaagtggatatgtcacattattgtttaggttggtttatttttggaacggagggtgtacaattaatattcagaaaatgtgtatgatattagtccagaatagtactatgtaggatgacatgatttgcatatcctgctaataactatatataatttataattctcctttgattatctatattcgagagcttgactaataactgatgggaaaattccagttatcttcactttagagggtgatttgataatctcacgctacctcttttattaatttctggcttttaacttctcttggaccatatatatacgggacatgtcttcagtggacgactacttctattaattatatattcttgcattaagatacatatactaataattatactacagtgtaattttatatatcaatcttgataattttaaatagatcgatctaaatcagtaaaaatatattcatagttttgcctcgcgcgatcgatagctagagatctgcataaactgatcaattaagcttgaacgacatactaatggtttaatcttgacattatatagataaaataaacatataaaatatctagtgcattttatcatatcttcattaaggtcacctagcttatcttattgagccaagtaagccggcctgggcccgctgtggctccaccactgtataacacctaaaaagatttatcaacaaatttaaatgctatttatttataactaaatgtgtactcgataacgcatcaattctctttattcttgaattcattcaaaactgagctgtttactcttgaattatatataattaacatttttttgcgatcgaacaatttgaactaattaaggatcttggtaatgtatccatttttaaatactccaatcactatacatttttgtactttgaccactcgatcgtctttccaataacatatttgcgaatgctaaaaaatatgccatattatcgaagggtataatatcctaaatataagcataaaactttcattaatcatataataactatattcaggagtaattagtggtcaaagatgaaacaacgaaagtcaatattattaattatatttgaaactagagggagtattactaatttatatatgaagatcaacatgaataaatataccgatatatatcctgaggttgcacaagtcattaatttcatcattttttttcttaactgatttgtttgtgaataaaatacattttttattaagcaatcccttcatttgtttccatgcactattgaaaacaaatgtgctatatataactgctgggtgcattatttgatcacagaacatgtgagatcatgcatattttggatttttgaacaaagacatacgtgacgctttttatttttttgcaaatgatcaatgggttatatttatgctcttatagttatatctgtgtacttatgcagttaatttgcttcctatttgaaacgtgatcttcatcattttacatgatggtattgatttcatcagctgtaatatgttaggagattatatatgcatgcgtctctgttattacacatttcaccaaactgactgataattttcaatcgccagcttgcagaggacaatcgatcgctacctgaaccacacaaaaaactcatctgcacatgaagaaggagaggaatcatgcgtccaggttcaaattttattcgtcctatttaagtactaaaatatcacgcatgcacatatactccctccgtttcgaaatgtttgacaccgttgactttttagcacatgtttgaccgttcgtcttattcaaaaacttttgtgaaatatgtaaaattatatgcctacatgaaaatatatttaataatgaatcaaatgataggaaaagaattaacaattacttaaattttttaaataaaacgaacggttaaacatgtgctaaaaagtcaacggcgtcaaacatttcgaaacggagagagtattaattaggagggataccatatgatgggatcgaactgtttttgactgaagatcatgcatgaaacatcatgcttattctatatatgcatgatcgattagcacaagatgcatgactgagtatgttaatgcacgaaatgtatatattacatatataatatatatagttttcacttggaattacttattaattgtgtttgggtatgcgcgttattttcacagaagtggagatcggaggctacaaccctgggaaagaagatagaagcaattgagggctacaagaggtgactaaatatatatagtacaaatgattaattatattagatatttatcaatctaactatatattggggtagtttgagaattaatgcacatacataaacgcatacagtaagctgttgggggaaggcctggggtcgtgttcagtgcaggagctacaagagcttgaagtgcagctggagaagagcttatgtagcatcaggcaaaagaaggtataaatatatatgttggatctcatctcgatcgattgcttatttgcttacatatagtttgccttttttggctcgtgtgtgtatcgattcaagctatatataattataaggacatgatctatctccgagcctatatttcatcaagaaaaaaaaatctctgaaatctcttatccattttgttttgatgtgggaacaattattgtgagcagcaaaagatgctgatggatcagattttggagctcagggagaaggtacgtatatacatgcattccggtctgaatctgtatatatatccctactatctactaattacatcgaatgattagataatctccacctagcagctgacacaaacatattttactacctgaatatatatatacacctgatatatatcctaattaagtacactagaatagtagaattaatagtggagaagaaacatgaatttcatctagaaactgtagtactcatccatacgcattatatatagactgtagtttttggaacagatcgatcaatactgtatatgtccatgtgtgttttattaatgcgtgtttaatttgtttgcaaacatatacacaaaacatgcacgcaggagatgaacctcttgaaggagaatatggtactccgtgatcaggtgtgcgtatatatatacatggctacatgctttgatgtgattgaaaaactccaaattgaatgcgaagatatatatgtacacacagatggagtcacgcacgcgatgaattatatatgtaattatatatgcagtgtaaggctctgtcatcgccatggtcgacgtctgtgggagagctgaagaataagcaggcggatgatgatgttcatcgtcatgaggattattccggcggcggcgtacgcgacgacgatgatcggcgcatgatggaggacgtggagacagatctggtcatcggacgcccgggatcgatatgatgaacgagcagcgctggctaacttcatctatccaatcaagaaaactctgtatatgtagttcggctggcagctaagctacaatactgaataacgtaacaattatagttttttttaaaaaatacagtacaaacgcaggaactcagaatacaacaatcacccatctctataaactcatacatacactttgtatctctataagcatttttgaaagacttgatatcttgagattgaagaatatatatgtatcaacatacatatgtatggatgcagtgaaatcgatcgatcgttcgatatgcgtatctgtattgtgttttaaatcctatcctattgattctttgcatccgtatgtgtgcagatatatgattaactaaactgaatcagctggatgttgggcgcctggaaaagtagctagctagctatagctagctattagtaaagctaaaattaatcaagatgagaggtgagtgatcgatgtacgttgtttgcttgtcgtggatatgcatatcattcatgtacgtatgtatgtatgtacgtatgttgccaaaaactggagcataaacacaagatagatctagggtttagatataaagtagtgaaaaacaaagtgtagtacatagcatttctgtgagaaaattatgaaggtgcaaaacacgcgatagcgagcgcagaggaatccaatcccgggccaagagtggattcggcccaacccaccacggcccacgcgacacgttgtgcgcacgtgctccgttcagatcaggcggactaggggagtactcctacgtgttaattaaggaagaggagaaaagagagagagagagagagaaggaaaaaaaaaatccccaaatcgaatcgatcggaatttgcttctccgttgaggcgaggcgagggcgaagggggaacgaagtggaaggagatttggattgattggttggacgccggcggcgcagatccccaattcgatctcctcctcttcgatcttcatcctaccctgcctgccagtgccaggtaattcaattcacccttccgtcttccccaattcacctcacctgcttccatctccacccccaaatcacttgattacggcttaggcttcgggaattaatcaccccccgctgctagttacttagggatctgatgaatctcatctcctactccctcaacctcaatgaattgaattcttagtttgttgttgttccctccaattgactcatctctgtgcctctatttccccgaattcattcttctctgtgcccgcccgtcatcaccaattccgttattattattatacctctatttcctgatttgctttaaattatcaccacctaggagccaagtcaccgccgggcttgtttactttccattgcaacaacgatagttttacttgttacatgtcaacacaacaataggctgttcgcataaccctcatgtctagtatttgcaaaatcatacgtacttaccaccgctttgcataactctggagtactagggatatgatatcatgcggtctctgtaaattttactaagctgattgatctttttcttttaatttcctcctgatgcagtataagattcttatgagctggtcggctgtggttttccctcaattctggtgctactaagatgggtcaggagctcaccacaaacaagcctctcacaaccctcttaccaacggatgaaatagcaaccgcctaccatttctccctcctcctctcacctgtcgtctccttttgggactgcatcttccgcaagataagatactcattcagacctgagtgggtgtagcatcctgcactgcctgtttctttttagcgctagccagtgctttgctttctggcctggatcactccaaacaatgaactttgaagcttttgctttcccgtaattacaattacagtcactagtggagtttagctgaaaatagtacatagttgtcatggaaaaggccgcggccaatcaggcgggcaaagtcttgaagaaaggtaagaagaaacaagccaaggatgaattagatcgccagaagcaggctgagaagaagagacggcggctggagaaagcgcttgcaaactccgctgccattatatctgagctggaaaagaagaagcagaagaagagggaagaacagcaaaggctggatgaggaaggtgctgcgatagctgaagcagttgctcttcatgtcctcattggtgaggactccgatgaaccctgccatttgatgctaaacaagcacagaagatgcaaccattgggatcactcagctggttttgatttcgccgtggatgcacaaggcgctgatatttatcctcctgatggactgatacagtgcgctgatcatgtttatgctcccaaagggaggtgtattgattgggggattggccagccattgccatcttggggagaggtgaaggacttgcagttgcaggcaccgtgctaccaaggaatgttccaccagtcagttgcatgcccaggtttcatagcagctcaagcggtctcctccttgcaaatcggaggagattcgtcagatattacctctccaagccaaggagcgactgtcgttaataggatgcttggtgccaccaacaggctcaacctttacagagagatataaaaacatacacttcacgatattattattgtatatagtcatcaaacttgtgttgactactttgcctgcagtatatctcataaccaaagaagaattggatagaacaccttgtttactgtttctgtgagtctaaaaggatatcttatatcagtcaaattggtattgtaatgaacatattgttttgattccctgttgattttcttggaatgtatcctgtgtcgacttgatgttctgtacagtgctcttgtgctttcttttacaactattactatatctaacttgagatgtcattctttttgctttctgtctatatggttgtacgatcttgataaaaagttgatcaacttttgattcagattggcactgtaggtgctgacctgaaggcccagagaacagtagcagctgtaaccttgcctcgtgttagaagctactgttacatgtcagtttaacagagaagggcagctgcctagaatgtaattaaaactggatagtcaggccaggaaataaacttcttttgggtgagcaaacaaaatggcgaacccaagcaacgtcgcaactaatggtaatgtcaccaaggtacgtgcaaagagccaaagggctacataagatggagtgatttacctagcttaaacttgcgtcattgttaactagcaggaggaattcattgttgtttactacagttggttgttttgtaataattggcttgcacaaattttgttcaaccttttgatttgcaggggagttgctgcctactgacactttgggtgattgtaagtttgtaaccatagcccatagtagatgatgatatctcctgccctggtgagttgtgaggtacattttcctccctttaaaaaactcaacacctgcagttcttgtctgccaagcgtgtcatgcatgagtaaattgctgacctcctagctgtactatggggttcaactgcattattaattttcctgttgcaacaatattgtttgctagctagcttttcctggttgaatagcacacatgtaccccaagtctgtttaactccagtgcctccgctagcactttagtgaagctaaacagtattaccgtgtctgctaacactgcttaacgctggcatcagcataggccgttgttccgttcagtattgtcaaataatggaacccggtaataacatgtatgtgttgtcaatcctttttggcctacagacctgatgccccctgcatggctgcatgcttccactcttcaactgcagtacaaattgttgcagaagattcaaataaagaaattggcaatatcgatacagtaagtttctgtcattccacaaggttggagtactccaaacttgataaattttgtgggaagtgaacaaagtttagtgggctacccaacaaataagttttatgtattcatttctaactttttttttgttgtaggaacaaccatcaccactatggtctttttaagtagtaaatattttttttagaccatctatgttttatgtcagtcgtgcattataagcacttggtagtggaaatggaatttcttgtaggtcttttaagtctttctactactttttttaaaataaaataaaatggcttctgcctttggctactttgccaagtcattgatagattacccaatgtgattcaaattaagggtgtgtttagttcacgccaaaattgaaagtttgattgaaattggaatgatgtaacggaaaagttggaagtttgtgtgtaggaaagttttgatatgatggaaaagttggaagtttgaaaaaaaaaagttgggatctaaacccggcctaaggttcaaactgaagtgaatggttttaatagttcggtattcagagagtgtaaaacaaacttttcccaattcctatcagctcctaattcaatttttaatgagctgcatggtttactttatctacaatagcaaagcaatagctaaggtacagaaatttccttccttttttactctccagatctttctatgtctagacttccttttgaatgcagtttcttcttccttttgcagcagagagcttgctggtggtggcaatgcgatgcaagctgccagggccagggcagggcaggggttgcagctctgtgaaagaggacgcgacgcacagcagtagtagtacgttacatacagccaggtgcatgactgataaagacgcatcgatggatcaatcggcagcatatgcatttgcataacacgcactgctcacccttaattttgacttcatttcttggagctacaagtacctttatatattgtccttcaattctcctggaaattattttcagttatactctacatttactggagtagcctcttttctctttgcagcatcatcccttttattactgcgcgcatcagttccatttgcgtctaatgctctgaggccgagctttaatttacactcaagtaagtatatactcctccaatctcaatgtactccagttttttccgactgttcaaattgtcaaatactaaatgtcatctcgctcacaaagttagtcgtagttagtgtagtcttttataatgctatattcgaaacagtttgcaccaaaattactttcctaattcttacatatgaactaaagcagaggggttgtactacaatgaatcaaaaaatggaggttgctcgtataattttgccgtatcccgttcccgtacccataatataaaggatatcctagaaggaattagcaatcatcgctctttcatgaatttagcaggattcttgtgtaatttagggggatagccattaattatatctaattaatcaattgattaaggaaagaagctagcctagctagcatacaacagtaccagaaagaaaacaatagatatgcacaagaggaggagacggtcgaccagaatgggcaccgcaatgcagcagcgtacaatagtatattaataggggaccctaatccaacacgggcccacatgtcggccggccactgtcattatcattaccaccaaccctgcccttccaattcaattcaattgcaaacaaacaaaacaaatatcatcaattgtaggcggcaaccactcatttccatccgtatcttttccacgcatcaaactggaccaccgtccacctatacctatctacttctgctccattggatagatgtaacaccaaggttttgttttgcctcctcaattataattacaaataattaatatttaactttaagaacatgagtactcccttctattcaaaataagttcttttttctcctcccattaatttatcacaaaatagttttatttttaaataatcattgcatgagagtttgtgaaagcagatgataaatacatttggagcagataaaataattgcattaaaatctgataaactagaaatattctagtctttttttattggtatgtgtggatggataaaaaataaagttattttagtacagatagagtacattcttaccggtggataggttatcacttaaaactacttcagcccgtcacataatcaaaaattagaatctccgaattgatattacataaccctagctccttaatttgcttgatatgcagtttcttgtgtatgtggaggagtttaagcatatatatttcttgatattttttttacaatatactcataataaattaagtgtataaggacgttaagccttccttgatctttagtgaaagaatttatttattatatgatgattaaatagaaacagagcaagtgtcgatataggatgcctagaagttaaagaaaaaagagaggaaaacatccattattcttgtctgtccgaacaactaacttattactactccgaccgactagctacttgatcttataaaagctgcaggcaaacacccaccacacctctaattaacaagcgctatggtggtctataaactatccattaatattcatcttctcagatgtagtattgcttcttcttctatttttaagctgcagcttataagggcatgtccaattatgaaattcagaaacataatttaggtttttttttaaatcgttttgtgtcacttaaccttaacatttgttccgttaaaaacagaagtacaaaagttttactaaaattattcttttttaacattaataacatgttttttttaataagccaaagccctgaaatgcccacgtttagagactaaacttatcatatactctttccgtggacccaaaatatgacaagctttatttcagcattcaaaaattgttatgaaacatatatacttgtccacccgctagcttcttgtcatcttgagcaatcagacctgcatgtgtcgtttaatttctctagctagctacttatgcttactcatccttactaattacaataatctattatctaattcccgtgaaaaaaaagctatacaaatgttatttatattttgggagggaggaagtattatgtcctaggttatctatacatgtatctagcggtgagacatggaagagagaaattaacataatgggggccggcggggtttgagatagacatgtcatttgtttgggatgtacgcactccatgcatcatatcgtacatgtcgggtttttgaatggagatcttttgaatgcgtagtgtcgtccgattgatcgatggagctacaatagctagctggatggatggatgcagtgtgggtgtctactactccatatatatgtcgttgttgcatggggtacgtaccatcagactagtcttttaggttgtgtagactcaggatctaaagttgtacttcgttgggcctgtggtggagtagacccaatgaaacctgagtggcccacagtgtgtgggctggcctgcgcactctaacaagtgctctgataccacttgttataagactggccccgaaatcacattggaaaccaaaccgcggaagaaaacactataggagatccaaacacgatgacgacaccgaggcaccatatttgataacggagttcagtcgtagcctacatctccagggtattgataaagggcactcctccccgatccagcatattagagttacaatgactcacggccggtcgccgctggcagccgctccctctcgctatgttatgtcgctatgcggttataacaggtacgctcctctatttatgagagagcctataatagaatccgactgttactttagtccaaacacctattacaactccaagttttaaactgtaaccgactacatacatatattcgatgcaaactctaacaatggatgcagtgtgggtatctactacttcatatatgtcgttgtcgggtaccagtactactgtagctagccggccagcaggcagcgtcgtccggccggccggtgtgagcccagcaccagaccattagaccaacatatatataaacagtacatcgatcgatcgatatgacagagattagcatagcttagccacatgcatcaatatatccctctccctctgtgtgtacatgtgtgtctctgctctcgctctctctcatgcatactgtatggaccatacatgcatatacgcaagcaagcaaggagagagagagagagagagagagagggggagcgtgcatgcatgtttaaatctggccgggtttgtatgctagctaagctagccattaatattttggcaatttgtgcgtgaccatcccggccccaacatatatattcatttatttatatatagtattatattcaatgcatgcattgcacttattgtcacatctcgatccatccatgataccgatcgatatgcatataggtgtagtactactgcctatctctctccttcctagctctatattacttcctcccagtgaccaatcaaagaaacatccaagttcaatatagtacttattaattatctactccatccgtttcataatgtaagttattctataatttctcatattcatattgatgttaatgaatctagacatatatatctatctagattcattaatatcaatataaatgtagaaaatgctagaatgacttacattgtgaaacgggggaagtaactattaaccgatatatctatttattttaatataaattagttagaattgaataatttacccgagatcctatgtccctaggaagattaagatagaaatgtcattgcaccctctatcataaaatacgcaactaccactatcctaaaaatcaataaaataataatattattatcttatcatttcttttatcccaataaacacaatgtatataagtatccaacaaaattaaagatcttcactctattaaagaaacgaatttagagaataaaaatgtgttagctaattgtatctacgtatgtatgtatgcgcgtattgtattataacattagtaagatgctgttccttgattaggatggagagagcagtactagctgatcgtcctgcctgattgagagagggaggagtcaatctggacaggattgaaaggttggaaccatatacacatagtacaattaacctctaattaagtatagctactactagtgcagtatcctttcattccaatataaatttaaccgagtataatgtgatatttaaaactatgaatctggatatatcgtcacatctgttttagattgtacttatatattggaacgaaagggagtagcaaattaaaaccctagccaccaatcgtcacatctgtttggagttgtgtttttaaccgtcgtggtagttcctatcttcaagtttttttattttgcctccccctctccttttttaggtataaaccagtctggctgattgctttgtgtaacaaaagctttttttctgctaatatattgacgtgcaatccttttgcgcgttcgaaaaaaaatcgagccatgcatatatgcacatgtaagcccaatttaaatcccgacatgcgcacagtaggatatatgtatacgcatgcatccatcaatgaatccaatcaacgaatcctatctatgctatgaagaacgtactactatatgaatcaattgaatcacgtattcatcgtgcgcaatacgtacgttgtgttagaagctagcgtcgttatctacatactgtacacagtacagtacgtatcaaagcaagtttgattaataaagtagtactagctacttccatgcatgcatatatatttgtgtaaagtaatcggtttttcaatccattaattaattgattgtcagcttaatttgctattctcattgagcgagagaaattaatccaaaatacatacagctgtgttggatttcgatccaacgcctaaggccagtcacaatgggggtttcactggtgtgtcatgcacatttaataggggtaagactgaataaaaaatgattatttgcatgaaatggggatgagagagaaggaaagagtttcatcctggtgaaactcgtcagcgtcgtttccaagtcctcggtaacagagtgaaacccccgttgaggccgattcgtttcattcaccggatctcttgcgtccgcctccgccgtgcgacctccgcattctcccgcgccgcgccggattttgggtacaaatgatcccagcaacttgtatcaattaaatgctttgcttagtcttggaaacgtcaaagtgaaacccctccactgtggggattgtttcataaaagatttcatttgagagaagatggtataatattttgggtagccgtgcaatgacactagccattgtgactggcctaagacatcatcacatctctagtctcttcaattcatctcgatcgatgggtcgctccaatggtgctcgttggatcgtgcatatatatgcttccggtgaccattgccagcaattaacagatgcgatgatgatattcggcaggcaacagtacgtactacgtgcatttgagaggacaaggacgacggtagactagctaggacgattcaagattcaatattaactgtccatttatagttctactagtaattaagcatttttttagagcttcgtgtcaatcggaaagaactggcgttgatgagatgaaacgtattatgatcgtggaccatgtaatatcccatttaatctgcacgttataggaaatatttactgtatcccatttaatctgtacgtacaaagaatacaaaactcagtttttactggttccaaaatttaaaattatcgaaacataataaagggtacaattgcaaacttgaatgcaactcgataattagtaattacaatttcaaaattattaagtcgtgctattttattatttctaaatattactacacgatttgatgataggatactacagttcttcgcaagaggagcatcctatatactacaatagtcgtgtgcccattctttatactaactcagttccaaaatacttgatatttcaagtttttgtttgtaacgtttgaccattcgtcttattcaaaagattatggaattataattaattttgtttgtgacttgttttattactaaaaatattttaagtatgacttatcattttttatatttgcattaaatttttaaataaaacgaatggtcaaacgttacaagaaaaaaagctaagcgaaagcgatatctaatttgggacggagggatcaagtatgaagtagatagtactccctccgccccatacgagctcttagttaatacagtacacatcacttagagaaatatactcttattgttcagataacaagctctctaatatatatgagtaaccattaatgcaccaaaatattttttatatccttcttttcttttctccatctctaatgcaataaaatttcctttaataaatactaagaatcaactctgagttgttgttatgcggagcaaccatatttcattttccccttctctcttcgacgtcatcaaatttacatcatggcaacggatattaaacatcattgtatataccctaatataagggattattcccttttagtagattaatgatagcaagaaagactagaataccctattaaatgagatttggttgtgcttgagtgggtagattggtgttaaaatatatactgtaggtagtaaaaatttaaattaaagttgatggatgcgataagtagcacactaaaatatcttatattatgggataaatagaatgaaaaaataataaaatttcccctttttccatgtgcgtgaatggtggtagtgtactatatttctattgtaaaagagaaaaaaaaaagtagagacagaagagccaaaaatggagaaggccagcgttgatttgtgcttccttcaataattcattcactgtcacaggaggtgactccatcagggaagagagagaaggagaaaagaagagaaaaagggaaaaataaaataaaagaaagaaagaaaaggagaggacgaacggactgactcatcagagggagagaggagacgatggataggtgacggacggtccttccttgtcgtacctgtcctgacatgtccaacgctgggggcccctaccgtcctttcctttcgctgacgtcacccccctctctctccccaccctcgtactatacggtataccgtatacatacatcggcatattcaggactacctggagcagaattttgtgaatatatatagcagtagggaacaagaaataactgaaatggtactacaacatccgttctaaaatcgacatccatgtcaaggttattccatgacacacttgtatgtacacctactactagtttacaccttaattttaattttaacacgcctagaaatgttttaagatatgaaaagaaatacctcaaggagatcaagcaggccagcactcgcgtatactcttatatacatggtcatcatatgcatatattcgcatgcttcccgtgcttgtagaataagtgatttttttttaaaaaaaacattttatatatactatgttcctaaataagtatctaacgtatttttttaagatagagagagtatattttttggaatatcattttaaatccatattttgactttatagtagtagtagtgtataacatcacaatccatttagatatatatccagctatttgaaaaaaaaaaacccacataattgggctggagaatacacgcaccagcatgcatctctagccacctcgctgactgacctggctgacctgacctgcagtttccagttccatgcatgaactcaaaaatggggggaaaaacgctgtgctgacctctccctgaacatgtggcacgcacaaatcccttaatcaaattcatcgagatgtgggacgaaacgaaatagtggtagtaatacgtgtgcagggcaacattattatgatatgtttagattgatacggagtgcagaattaattagtcactttatttatataacagacccctgtggtgtgtgattagagacagacagcatcagcatggcccatcacctgacacttattttatagtacctctacacatgctcgcatgcacgtaattgtatattgttcgcaagattttagttactccgatcactcacaagttcccaaaaaggaatcgccccactaaaatatactgcaccacagctgactggtggattaaactatagtgctagctacacgtagcacgtattttgcttaattaattgtgtacaaatatttatgcattattcgtaattttgtttcctacaaaatgtaaacaccgcacactccctccgttactttattgttggcactattgaccagtgagtatcatttaaaccttaactgctaataatttttaatagtcagcgtatgatgcatactagtaaatgttactcgatccaataatataagtatatatcgtttcaagtctttacgatgttttttttaataaaatgaaggatcaaattaagttaaatataaataatgcgatggcgcagccaaatgtcatcttgttttcttcgcaaccgatgctggtgttgtcggcggcggtgcagcttggcattgctgtcgatcacctcctcccttggccagcatagcaagcctcctctccttgttcgtcagttgagttgatgccaccagcttatccctctcaatgcaaaccatcacgtgacgtgcatcatgcggccggccggctcgccggatctagctcgagtagtcctagcttgttgatgatgacacagcgagttaaatttgtatctggccggccacacaaactccctctcgtccgtaacaattaatgtagattaggcaacaatatatatatggtgagctcgacagcgataagagggcaagcctgagtacgatcgatgttggggtaagctcgatcggcaatggtgtcgggaggacgagcgcgtgcacagtggccgccggcaggagggagaggacggcaagtgctattgtatttggtgataaccacatgtagagctgagacacccgtgccttctgcaatacaagggtggctctgtgggatgggcaccaacggtggagctaagtggtgagccgagaccactactagctaggtaggagacgagcattgtggatgtggattgccatggtaggagtgaagtatactgtaggaagatactcgcctcctggatctggagtatgctggtgggtgccaggaaaaaccaaccgtacccatggaacaaccgcctagcagctggctggcgatactgtgagctcactctctgcatattcattcagagtgatgtgtctgacttactgacagcctttctacgaagtaccagactctccactccacacacgtgcctaaaatggcttcttcttcttccataatcttgacacggccaacggaagaaataactaactaacttccataatctcatggcgataaactttgcttatactcctgtccttgtccattgataccccgtctgaatcttcttctcttacaaacttgcacggatttccacccctcttctgtgcattgttactactactttaaagttggattttttttttgtctatgaaaatttactttgaattttatagctataccgaattgactcgctgaattgttcgagggtatctgttaaatgcagttgaaacatcaatgatatgttgttaatgaaactcagctgatagtgtcaattattattatgataatgaacaaagcagggagtgtgataattccaccatgaggagcgcacacacaggtagacagtcaaagacgacgactagctagtactccttccgttccaaaagttccaaaagataaaagcttttttttatccttacacgatttatgagatgttattttgatcaataatatctataaaaataagatacattaaataaaaatagctgtatattataatagtttatttaataataaatctagtaatatcaattttgcaagattgatttttttatactaatagttaaagttaaaaatatttgacttatcaccgtactaaaaatgcttatattttacgccgagggagtacctgttttgttttaattaaaaaagagaagaaaatgattaaaacatgcatctaccgacacatcgtctgacatttgactattggacggcctcctgatcacattcacatctagcattgcagggacaaattataaaccacaataatcctcctccttgaacagtgagagatgatgagtaggagctgattaataagctaatctgttgtagatgatcatatcatatataagcgaaaaagcagtactcactaattaacatgtaaggattaaggaataatggatatagctaagagagaccaacagaagcaacaaaagaagaaaaatgctgtgacttgtgagcccagccaagctatcactatctctctctctctctctttgtgcagatgagaatgagaggagacgatgagacgagagagagagagctattaagcagcagaagaagcttaattgcatggctaatgatgagaaggaaggagagagagcaataagcactaaactagttaattaatggccgtcatggctctcatccacttggtcgtcatgatcatcggtcgctctcccaacgccaacgccaacgtcttcctcgtcgccgtcgccgtcgccatcatggtgcgcctcgtcgccgtcgtccttcgtcctcccttcctcgttctgctccccgtcgaacgggaaacccggcggcgcgcaccgcacgtctgggtacttcaccaccgcgtccagcagctccgagctgcccttcgcctcctccccgccattgccgcccgccgaggacgacccaccaccgccgccggagccggagcgggagtagaggcggtcgagctcgtcgaagtaggggcacgtcttggcgtgcgccggccgcttcttgccgctctccttggccttgcggaagtacttgttgatgttctcccacttctccttgcaccgcttcgcgttccgccggtagcccgccgccgccatgcgcgcgctcacctcctcccacagggggcccttcagccctggctcctggaacctatcctccagccccgtccgcacccggatcagcgcctccacctcgtgcttcggccaccgcgacgagctcagctgcagcgacccctcgccgtcgtacgccaccacctccttccccacgccgtcctgctcgtcggcgcccggagcggggttggcggcggggggtgggagcgtgatggtctcgccggagatcttttccaggtaggcgatgatggcggactcgcgtgcagcggcgctggcgcggtcctgcgcgcgcgcggcggcctcgcgcgcgaacttgtcggcctcctggcggcgccacgcctcgtcgcgggcggcgcgctcccgctcccggcgctccatggtgtcgaggaactgacggtggaggctctcctggtgctccatgaggcgctgcaccaggcgctcgaagaaggaggccgacgcgctgagctgctcctggcgccgccgcttgcgcttgcggcgcgccgcgtccgcccccgacggctgctgcgtctgcggctgcggctgcaccacggcgtgcgcgtcctccccggcagacgtctcggacgtgttgaggtgcggcgggttggcggcggcggcgtcggggaggtcagccatgggcggcgcgagcatggcattgtcgtccccggtgaggccggagccggagcccgtctgggggcctccgctgccgggcttgtagatggcctccagctcgctgaagagcttgtagttgacggcgccagcggaggcggcggatgcggcggcggcattgtcgtcgggcttattcttgaagtaatacgctgggggcggcggcgcaggggagtcgggagtggcgggtttgtccttgggcggcgccctcttgctgctgctgctgctgtgtatgtagtcgatgtcgagtggccgcctgcacagcaaatccaacaaaacaaaatcaatgtcagcaacagctcgctccacagctaattaatctgcacaatttggctgcagctctgttgctaattgatttgcaagaagaatatggcgtgcgggcggggcggggcggcgaggaagaagaagaagaaatgatgagtgcatgcaatggcgaattgaggggggcggttgggttggcttggcgctttttggtgagtgaggtaatcatcaagtcgaaaaagggggagacgaaaaggtgatagctttgcgttgttgtggatgtggctgtgaattctgttgatggagaagaagaagatgagatgagaggaggaatcgcgacgcatccatcatcatcatctgtgtgctgtgcataaatcagagagggaggaggaccctgcgcttgcgagcgatggctccctttctcaatcatgacactattattggccgtcctctgctcccctctcccgagcaaagagagcatcctaagcaaaaaaagctctcctccttttcctctctgttcttctcttctccaccatggatggatgcatgaatccactccaagcacgcactcactcactccaatttcaactcaattttaggctgagtaaggataacttgtacgtaccaggtcggttctttgatggaagtttcctcgtcccccggccaccgccggagcctgctctccgtggccgcctcgtcatccccgccaccacctcctcctcctcctccatgaagcatcatgccgctgcccgcgccgcccccgtcgttcagcgcgtcgtccgttccgccggtggcgccgctgccgccgccgccgtcgacccccagcttgaagctcatggcggcggccaggaacggagggacgcccggaggggcggcggcgccggaggcagcgctcccggcgccggcaccggagctctccggaacggccgcctcgacgtcgaggccgagatggtggtgcgggtggtggtggtggtggtgctgcggggcccacctagccgggggcggtggctgctgctggtgcttctggtggtggtgctgctcgtggaagagctggaggtgggggtggtggccggcggcggccgcctggtggagcagctgctgcgtgaagggaatcccaccggcgccgccgaagtgcgccaagtggggaggcatctgaggcggcgggtggtggtggtggtggtgctgaggcagggcgtggtggtgcagcggctggtacctgaacggcgcgcccagctcctggccaccggccgccgccgccgcggcagcagcagcggcagcggccgcctgggcgggctgcggcggcgcggacatggcgaaggcgccggggtccatgatgtactgctggaactcagagacgccgccgtagccggactgcatggcgcctgcctgcagcttgctactccactatcttcacctagcttgctaccgagtagagagtgtcactcaccttcacttcacctagttcgctgcatcaagtggtttacatgccggtcgggtaattaagaaggtttgacctgagctaaggaagaaaatgcagccagccaaaaatctcactcacccctcacaacggtctgagctggagctggagctggaggtggaagaagaggatgaggcagggcagtgcagagtgcaggggtgaagagaggaggaaggaagaagggagagggtagcacaggcacagggaaggtagtcaggtttggtttccattttgcatctctggtggggtgctcggctttatctcctgcctcttttcgaaaggggaccctgctaatatccatatttgtatctccacccatccaggccagcccagggtgctcattattattctccttcaggtccttgtcccggtttgaatggactgttgctctttcaggaaacccctcctcgctttttctttaacaatcctgtccgggttttggggcgactcctttttttttttttctctctctctttcaattcctatgttcctatctattactatcgtcttctctcttttattttttacgctgctccagttattagtatttctttatttgtttgtaccaagggctcattcgaatcacacgatagaaaaaacataggccgagtttagttccaaaatttttcttcaaacttctaacttttccatcacattaaattttttctacacacacaaactttcaactttttcatcatatcgttgcaatttcaaccaaactttctattttagcgtgaactaaacacccccatactttagggaagatataggaataaaaaatgaattcaaatgtaaaattgaggatcgaaaaacagagaattatatataatgggagaacttgaaatagaggataagaatagaggaagatttataaggaaatgagaagtaatctaactctacttttccccggactcttctttttctagctgacgagcaacacacctttgtcccgttgccattgccaccgaatgcggcccaacacgccacaactacgtggcccaactccacgctgtcgattgtgctgtccggcttcttccgccgcctagcttcctctaggaccccttcatgctcttcccctcctctctgacttttgcgtctgcccaactttgagagtgagcccgtcggccgctatgtcgttgactctctcatgcatcattcactctacgtcgaaaaccgacctaaaaaaacaataatagtactacgaaaatgcagttgtaagtatataacaactttacaatatatacactatgggtatgttcggtagctgtttctgtggcagcgctacggctgcgatgcatactgtgtgtggttgtggctatattgcttgttgctacagtcctgccagccgaatagaccctctagtaattcttgtgtttgttcaaactgaatgttagtgtcagtgtgtcactaccattccaaatcgagatgatgatttccacacaaaaaataaaaacagcagcgtcctatgaacactgcaatatttaaataatgcatgaacaaggggagtaaagtgaaaaagacctgtccataaaaaggaaaaagggaaataaaagtagagaagaaaaaaaaaggggggtttagtacaggctacagaggggaagcaggtgacgtcagcgccactggcaccacacacgtgccatgcacgtgtgaagacaaaggacgatttggtaatgtattggtgcatgagtatgatgagatgcctagggcactgcagttttattactagtactaatcgctctgcttcttagaaattgatgatccctgtctgccaaacccagattttccatctctaatgatcttcttgaatcatctgcttgcttgtctgcatgcacgcacctcttcatcatcgtataattggtttttggctcaacgattcaacgaattacgcataacagtttggagaggaggacactgtcactgaggatgcagcggacacatgagattagaggagatcaaccaaatggtgacggactcattagattggtggtaggcctcatgcatgacgactcgatgaatcgatcgatcattatcgttgtgggatacacagtacggagtagataaagacgggcgtcaagtggtgattgggctacacagttgactaccggtccgtacgtagtacacggtggcatctgcctccactattacgtggcatgacatgctactttacgtgggtcaaatcgacatgacatctggccgccacgcacagctcgaccttctcctataccatgcgagaaccaacatcttttttttttttttacaaatgttattacttaataatgatatttataacatgatggcattacgaatgacctcatgctttcacgtcggagctaagcggctttattaaacgggagagtggcatcacatacaggatacatacgtcttgccgaagatatgggggtccatgcatgcttaatagaaagtgcctgtggcacaaaattaaagccaccacacaggatttatatctcatcgcctatctttcttatacattcgttctctttcattgtcctctatttaattaatgacgatactgatgaggatgacaatcaacgctcttccttcgctcgtccgaccaccattgcccctatctccccgtagctcgggcttcgggcactaccattttctttccctatggatttgacttacataagcccattctcattatacccaaaatgttcccacttaccatcggtatcatcctccatacctccaaccatcacaatcgtcaccaccacccatttacggatcttagacaacctcaatggttggtttgctctgggcgatagactaagtgaaaaatctaactagtgcgatggcaaaggggataaagtggattggtgaaacgacggttttaataatagagaactagtgacatagcggcctagtcaatagcgtctataacgaaagatcgacgacttatcaatttgcacattcgttgccttctccccaattccagaaccatccatttctccttgaccattgcttttactctcaagccacccatcttctttgcaaggaacattgatacattttaagatactccgctcgttgttaacgcgaaacgtgagatacacatcagagtagaacgttgtaaatgcccttagtttgtgtttgatttggagctgaggtgggatgggttggactcatccttgtttttaggacgggatcgtcacatctatccgtttggcgtgagggatggattggtcctatttttcaggggataactcacatatcagtgaaacataacagttcaacccagattttaggataatattctctttcagggatcatctcctacatatccttaaagcaaaccatcctggaaaatgggttcaactcaacccatcccttgaaccaaacgcatgactagagactgctaggaattaaagttaaaattccaatttgcaccatttctcaaaacatattgctgcatttgtatctccacgttctagctagctagaagatcgattatgatcagctccaacaaaaccgttcgaatagaggaagaagacggatgagaagcctgcacggcgctatctatgctctacacacactacagtagagtgaaagctagctagagtccaacgaaaaggaaaaagaaaaaaaactaaaggctatatagataggagtagctgctatatatgcatgcgcaagagacgctagctgccacaacgagctgatgatcgatcgagctcttggcctccgtgcctcacaaagtaagctacgcctacctacgggctacgtatacgtacgtacctgtagaaatcaagaaaggaggactcatcagtcaacctctaccaagctaattaaattcagctcaaaattaaaggtccaacatccaagaaaataagtttagcgtggcttagctccattccgctgcttggagtctgttttagccgccgtagtttctctaagcttaagttttttcttattttgctttttcttccctcccctagcataaaccagtctggctgattgcgtggtgtaactaaaactctttttttcctaatatattgatcgtgcaattcttctgcgcgttcgcgaaaaaaaaaacatccaagaaaatagatccttcggcaaagtgccaccatggctgtgtttagttggtgtgctaaatttttctaagtatacagacacacatttgaagtattgaacgtagactaataacaaaacaaattacggattccgcatgtaaactgcgagatgaatctactatgcctaattaatccatcattagcaaatgtttattgtagcaccacattgtcaaatcatggcgtaattagtctcaaaagattcatctcgcaatttacatgtaaactgtgcaattggtttttttcgtccacatttaatgctccatgcatatgtccaaatatttgatatgatggaaaagttgaaagtttgaagaaaaaagtttgaatcttgcatgtatcaatcttcgtcaagaaaaaaaaatcgctcgactaaatatcattgcattggtttcttatgtactatcacttaaataaatatagcatttttctttataaaagtggtaagataaattagtatgagatagatctctctacgaacatgcaaattcaactcacttcatttcgtattataaatcgttttgattttttttaatcataacttattaccaacatatatacaacaccaaattaatatcgttgagatgtaatattgaatatgtttgtttttattaaaaaaattctatattttcctacacatctactagccccacctaaagaaaatatggcacatgcacacacataggattgttcatttggggactaattagggaaagaagcaacaatggaaagcagggtcgatgttaattaactattgatatcctatgtgtaggtactgatttgaggtatagacctgacctaccaatcgagagttggagacagtattgtcatccatggtcaatgtgtgtagccggcctgcttgctgctcgatcgatcgatcgatctctgtccatatttatcgtgcttatgcatgacagcatacttcatatatatactagctattgcagcgctcgagcagagaatttgtcctgaacgtgtacagtatacaatgatctgtcatatttaccagctgcatgctagctgccgcaagcatataggagcacaccggatgtgcgtgtgtgtgcacgcagatcaggcggccccctagctagctgtacgtgcagcctccatagacagatctagaggggagagaagggaggccggggaagaagatcgagaggaagacgacgaggctccctccaagctaaagctaaatccacctctgtttgtagcattcatattttaaatttttagatctaaattcatatgtgttcttaccctaaaaaaatcatttgtgcttgcctcaagattacaagatcgatatgtattgatccgtggaagaagatctgtcaggcggagcaagctctctctcgttgctgaggtagcagtcaagagtactgttggttgggagtttgacggtgggccttcttcgtggatgttggctgggcatattggatttccctccttttgagaggagcttcatcggtacgatgaagacggtggctagacaaaatgaaaatacttaggatgctaatgtagaatcgaaacacaagaactaagctaatcagaagggggtgaatggttggtatacctaaaaaccgaaaacttttagcgaaaataaaagttaccctccaattcgacggatcacggtctgaccgaagtggatgcgctggtctgaccgcctgatgaacgtcggtctgaccaatgtagatcgatcggtcgaaccgccgaaatcgcttgccgccgcttgtctgtgccgccggtctaactgcccttgcgccgtcggtctgaccgccgcttgttgccggtctgaccgccagtgggatgccggtttgaccgccgaaacccggtgaaacacaaatcgaagaactctcaaattagataacaactttattacttctctctgtgtttacaaagtgcaccaacaatactccttacaaaaatctcgactaaactcgaaaccctaactaaactagcaactcaattgctctcaaaagcgataccgggaagcctcacgctccccctctatttacacatgaggtaggcagcctaaagccacgaaccaaactcatactaagagtcctaaacaccttaggaaaccctctagtacaagacacaaactttacataaccaatcataccaaatttggactccttccaaattcgactccgcatcccatacgcacacaatacctccatcgtatgccatatgaaatcttcaccaaccacgtgcatcaactctagccatgaaacaaacaaagaaaccatattccgaaaccaagctatccccaacttgactcattagtagcaaacaacagtattacatacgtatagtatccatctagaagccatataaccatgaaacaattacggatatccaaagaaacaacccgaaaccgaaaccgacacagcgtcggccggtcagaccgcgggccggccggtctgaccgctcgatcaccaccggtctgaccggcatacacagcccggtcgaaccggtcacataaaataacagtaaatccaatcatctctgtcggtgacatgggatcaggagtatcatgactagaggtttgaggcagacacaatcgcacacgtggcctggtacccccgagggacgtcgggcccgagggtgatgcgttcgccctcctcttagtccccccgagggggtcgggccgcacccccctcggccccgagggccgaggcgccccgacccctcgtgggtttttgctccgcgtgtatgggttaggtgagcacagtggggctcacctaacctcatttattgcggtttggctgagcgtgtcacgccgcatgtaacgcagtgcagtgcactcgtttatccggtctgtgaccagtcacagaccggtcagatcgcgggttaggtggcgacaggcgatctgacgcacgcctcgccccatcccgtcaggacgagggcttctaggcgctcgtccccagctggagctagcgtgttacctcccagagatggcacgttagtcctggtcagatatatgccaggcttcatcctaaccattacaggcaagatgttgtgtgaagaagggcgagcatgtagattgctaagctgacacgtggtggacaagaatgaccgacgtgactggtctgataccggtcatgtcgtcagcaaacagccacgattccacgtcgcacctgctcccggtgaaagtggaggtagttgtgggccgtctcatcagaaggtgactcggacgacaactatacaaatctccgtccatttatgaaaagggggggggggtaagtccccacaaaaaagagagaaatggtgcatgtggtatccccttaagatataaaaggaggaccttgcccactgagaggggggactggacttttccagattagaaacccagaacaagggagaggctggctgatactttgtagctccttcatacacagatctcccaaaacacaggagtagggtattacgcttctcagcggcccgaacctgtatacatcgcccgtgtcttgtgtgtttcctgtctcgcgagccttccacatacagagagcttagaatctctccctgagtccctggccgaaccggcaaaggggggcctgcgcggtctctcggtgaggagccccacgctccgtcatcaggcgcgccaggtagggggctctgcgagggattttctgagctctcgcactctttcgtgtgcgccaagcttttcctgttcagcccaatggccgagccagcaaaggcgcacgacctctccccgagtatgagcggtgacgacggggagccaaacccacgccgtcgagctcgtactccaccgccccctccacgccaaagtcctaggcgggagaaggcgctcgagagggccgaaggatccgcgacttcgacacccacaggaggtggagaagggcggcgagatggggagcgtcgcctcctcgtctacggcgacggcagcacgccccagggcgcgctccaagctgcgggcgcgctcctacgtcacccgcccgtcgcccatgacccggagtctccagcccaacgttggctggacgatgtggccaaattggtcatgactgcacggcagcgcctagatgctggtgggcggtcctccgccaccaaggcctctggtgctgctaccaccggctccgcatcgtcaagacggagggcgcggcgagcggcagccgctgttcgccattcggccgccactccttcgtcaacgcctccgacccgggaagatctgcgtggggaaccggatgctcgcatcagtatcgagcgccggcgtaatggccgacgtgctccccacgcaacggagggcgcctcctcgtctggagtgtcacctcaccacggacgcggggatcagccctccgtgcccccggttggtggtgtcggctgtagagcctttgtggcgagccttcggaatgtccgttggcccccaaggttccggcccaccatcgccgaaaaatatgacgggagcgtcaaccccgccgagtttctccaggtctacacgaccgggatcgaggccgccgggggtaacgacagggtcatggcgaatttctttcccatggccctgaaaggacaagcgcggggttggctaatgaacttgccacccgcgtctgtccactcttgggaggatttgtgccaacagttcaccatgaacttccaaggcacatatccgcgcccaggtgaggaagcggacttgcacgcagtacagcgaagggatgatgagtcacttcgctcgtacattcagcggttctgtcaagtccgcaacaccataccatgcatccctgcgcacgcggtgatttacgcgttcagggggggtgtgcggcacaaccgcatgcttgaaaagatcgcctccaaggagccccagactaccgcggagctttttcagctcgcggaccgagtggctcgtaaggaggaggcatggacctggaacccctccggttccggtgtggcagcttcggccgcccccggatccgccgctcagatagggcggcgtgacaggaggaggaagaagaggtcagcccataccgatgacgagggtcatgtcctcgccgtcgagggcgcttcgcgggccacccgaaaggggaggcctgcaggaggcaaaaagaacgaggccggcgctcccaacagggagcacccaaccggcaagtggtgcaccgtccacaacacttcccttcacgacctcgcggactgccgtgcagtcaaaagtttggctgagcggacgaggaagtgggaggaggagaggaggcaggagcgccgagagggcaaatccccggcggttccttccggtaatcggcgaagtgaggccaagcagaaggcccccgccgaggacatcgatgacggcgatgatgacctaggtttccaagagcctggggccaccattgccaccgtcgatgggggagcgtgtgctcacgtttctcgccggagcttcaaggccatgaagcgagagcttctggccgcggcccctactcatgaggcgacgtgtcgggcgcggtggtcggaggttgccctcaccttcgaccagaccgaccacccaccgtgcgttgcccggggagggcagattgcgatggtggtttctcccaccgtttgcaacgtgaagttggggcgtgtcctcattgatgggggagcggccctcaacatcctttcccctgcggcctttgacgccatcaaggccccggggatggtgctccggccgtcccagccaattatcggtgtgacgccggggcacacgtggccgttagatcacatcgacctaccggtcaccttcggtggatccgccaacttccgcacggagcgggtgaacttcgatgtggcggacctcagtctgccctacaacgcggtcctggggaggcccgcgttggtgaagttcatggcggtggtccactacgcctacctacagatgaagatgccgggccccggtggccccatctctgtccatggcgacctcaaagtcgcgctcgcttgtctggagcagcgcgcggaccacctcgccgctgcatccaagcccgagggtggcgacgagaggcttggcgcttccgcccccgccaccccgaggcaacggatgatcacaggcgacgaggtcccggtcaaggaggttgccctgggcgacggcccgtccaagaccacacggatcggtggtcttctggacggcaaataggaagacgcgctcgtctccttcctgcgggcaaacgctgacgtcttcgcatggagaccggcggatatgcccggggtccccagggaggtgattgagcaccgtctcgccgtgcggccgggcgcaaggccggtccggcagaaagtgcggcggcaggccccggaacgtcaagccttcatccgcgaggaggtggcgcgacttctggaagccggattcatccgtgaggtcatccatccggagtggctggcgaacccggtggtcgttcccaaggcgaacggcaagcttcggatgtgcatcgactacaccgaccttaacaaggcatgtcctaaggatccttaccccctgcctcgcatagatcagattgtcgactccactgcggtgtgcgaccttttgtgttttctagatgcatactctggttaccattagattcgcatggctagggaggatgaggaaaaaactgcgttcattacccccataggaacctattgttatacgacaatgcccttcgggttaaagaatgcaggtcctacttttcaacgtactactcgaatttctttgggtaaccaattaggacgtaatgttgaggcttatgtcgatgacttggttgtaaagacgcgcaaccaggaaatgttactctcagatctagcggaaacttttgagagtctccgctccgcccgcataaaactaaaccccgataagtgtgtgttcggtgtacctgcgggcaagcttctagggttcttggtctctgcccgaggcattaaggccaaccctgagaagatacgggctatagagcggatgcgcccccccagcaaacttagggatgtgcaatgcgtcaccggttgcatggccgccctaagtcggttcatatcgaggctgggagagaaggcgttacccttatttaagcttctcaaacgctccggaccgtttacctggacggaggaagccgaaaatgccctcacccagttgaaggcgtatctaagctctcccccagttctggtcgccccggagccagacgagcccttgttactctacttagcggcgaccccgcaagtagttagtgcggcattggttgtggagcgcgatgagaacagttctcatttcacgcttccccaccctgtgccgacttggcccgggagagagcagggaggagaggctcccgagccgaacggtgacccaaggcccccgacgaccggagttggccctctgcccacttgtcagacggtgctaggagcccccgacccccaggaaggccctgaggccactgtgggaaggccgcacctatcgcccttcgaccccgaggctaaccctgtgctgacccgacccgggaaagagcagggagaagaggcccccgagccgaacggaggcctaaggcccctgacgaccggagttggccctttgcccgcttttccgacgacgccaggagcccccgacccccaggacggccccgaagccactgtgggaaggccgcccctgttatcctccgaccccgaggtcatcagcacagaagataagtgcgccccgcgaggctgcttggacgaagagtgccccagggatgcggcccctagcgaagaggatcggccccaccgaaaggtgcagcggcccgtctactttgttagtgaggccctccgggacgccaaaacccgataccctcaggcccagaagatgctttacgctattctgatggcctcgaggaaactgcgccattatttctaggcgcatcgggtcacagtagttacgtcttaccccctcggtcaaatcttgcataatcgagagggtacaggacgggtggtgaaatgggcaatcgaactttctgagttcgatttgcactttgaaccacgccacgctatcaagagccaggccctcgccgattttgtggcagagtggaccccggctcccgagcccgtctcgatccccgaggccagcacggacccctcgcagctgcctcacaccgcccactgggtgatgcagttcgacggctccctgtctcttcagggcgccggtgcgggggtcacgttgacctctccgagcggagacgtcctcagatacttggtccgcctcgactttcgagcgaccaataatatggcagaatacgagggactccttgccggactaagagtggcagctggactggggatccgtcgcctcctggtgttaggtgactcccagctggtcgttaaccaagtctgtaaggagtaccggtgctctgacccgcagatggacgcctacgtgcgccaagtacggcgtatggagcaccattttgacgggattgagcttcggcatgtgcccagacgggataacatgattgccgacgaactctcacggctcgcgtcctcgcgagcccagaccccaccgggcgcctttgaagaaaggcttgcccagccgtcggcgcgacccgaccccttaggggagacggatgcgcctgaccggcccccgaggcctgtcggagtccaggcctcgggacccgaggggagtgctcccaactcccttagattgattgcttggatcgccgagatccaagcatacctcacagataagactctacccgaggaccgcgaagggagtgaacgcgtccatcgcatctccaaacgctacgtgctggtagaagggaccctctatcggcgcgcggctaatggaatcctcctgaagtgcattcctcgggaacaaggcgttgtgcttcttgccgatatccatgaaggcgaatgcggagcccactccgcctcgcgcaccttggttggtaaagcttttcgccagggtttctattggccgacagctcttaatgatgcggtcgacctggtccggcgatgtagagcgtgtcaattccacgccaagcaaatccatcagccggcccaggccctgcagaccataccactttcgtggccatttgctgtctggggactcgatatcctgggaccgtttaggcgggccccgggcgggtttgagtatctgtatgtcgcgatcgacaggttcactaagtggcccgaggcttatccggtcgtcaagatcgataagcactccgcacttaaattcattaagggcatcacggcccggtttggagtgcctgaccgtattattacggataatggcacccaattcactagtgaactcttcggcgactactgcgaagacatgggcatcaagctctgcttcgcctcacctgcccaccccagaagcaatggccaagtggagcgcgccaatgcggaaatcctcaaaggccttaaaaccaagaccttcaacatactcaagaagcacggcgattcatggatcgaggagttgccagcggtgctctgggcaaaccgaactacaccaagccgagcaaccggggaaacgcctttcttcctcgtctacggcgcggaagcggttctcccatccgagctcaccctgaggtctcctcgggctaccatgtattgcgaggctgatcaaaatcagcttcgcagagatgacctcgactacttggaagagcgaaggcggcgcgcggccctccgagccgcgcgctaccagcagagcctgtggcgctaccatcagcgccatgtccgggcccgatcactctgcgtcgacgacctcgtcctacgccgcgtccaaacgcgtgctggattgagcaagctttcaccaatgtgggagggtccgtatcgagtggtcggcgtcccccggccgggctccatacggctggccacgggcgacggcactgagctgcctaacccgtggaacatcgaacaccttcgtcgcttctacccctgaggggggggtcgggtgtcaagtttcgggctcgggccaaccccgcacccccctcgggcgtgcagggttggccgggggctacaacatatgcatattcttatttctcttatatctgaatttctataaaagcagtttcaatttcctaaaggctgtatctgtgctgttttttccttttgaagaatcttgacttgaaataggtcactcgtgctcaatcctgccctcgggggctcgggtcggctaaaatcgccaaacggggcccagaaccgagccgtgcctcgaggcgtggtgaactccgggggggaatcggcaaaaacccacaatcgggtcacccataaccctcggtcaccacgttcccggcctggccagtctcgacatgtggatctccccaggcactagccccgacccgcgccttttgaggaccagaacctgggcacaagcccttattcaagctaagacacaaaaggaccacggcacagatcatcctcatctcatactcacagcaagatgaaattaacacaaaaatttcttcatttttgattacagattaagttgatctatacaaaaaagaggcccgaaggccttagaagaaagaaaagaagaaaaaactgaagaatggcgggggtctgggggctcaatccgatgcgcccggatcgccggcctcgacgtcactatcgtctgcaccaccggcattgccctcctcgtcggagttgggggcgaacgcaagccgaggggccgagccctcgaagctgtcgacgatatggtcggcggcatcccggacctgcgcgcgcgcgcggtcctcggtcccaggagggaactcatccagcgccatccatggagagaaattggggtccctggcctggtaactcgccaggacgagctccaccgctccttgggcgaggtccctcgaggatgacttaattgtcttctcgagctcctcggggagccgttggagagccccggccatcttcgagaggcgctgggcgaggcctccctggttggcggcgtactttacggtccgccctctccagaggcccacttgccgaccggcgcaatctaggcgggagacggcgtcccaaagcatgccgggccctacctcgcctgccaagcggagggcttcgacctccccggcggacgagtccagcgcgccctgcagatcggcgatggtgcgttcggcagctgcgaggcgggcggctaagtcgctttcgcccgtggccgccccgccgctgcgcgccctcgcgtccagctccttcgcccgcgcctcgagctcagcggcccgttggttcagtacggccctctcggcgcgggcaccttccagattacggcgcgcctgctcctcctgcgctgcctcgcggagggacaggttgaccgccagctgttgcgccgcggcctcggccccctcgagagctcgctcccgttcggtgagcgcgtcctcgcggaggcggagcgtgaactcttcttcggcgcaggcagcctcgtacgccaccagcgttgcttcccggatggtgacggcggcctcgcggtccgccagatccctctccacgacgtaggcgcgctcttccagcgccatggcgcgcgcctcaagggcctcttctcgccgccgggacgccgcttcggtctccgccgcccgctgttctcgggcagcggcagcgtcaagcaccccctgggcggcgtcgagcttcttccctagctccgcctcccagctcccgtattgaaggcggagggtgtcctgcgcctcgttcatcacggtggtggcaatgagggcagccccccgctcctcctccacttccttggcgatctctgccagcaccttcttacgagtttcaagctccgagacgtgccggcggtgagccttatggcccacctccaccatggcctccaccgagcgtcgcccctcttcgacacgcgcccacgcggcgtcgagctccgcccgctctgcctgcaggacctccacctgggcacttaacccatccaacaccgtggtgtttgcggcggccaaggcctgcagaaggggctctgcgttcagtagggcgatagaaggcgtggggaagagccgccttggagaggatgccacgcggctcgggccgccgatggaagtgccggactcggggatgtcccccggacccggttggtcctgagcgtcgcccgagggagtaggcccaagcgacgcgcccgcggcctcgtcgccagctgccccggaagttgtcgcctgagtgtcgcctgagggagtgggcccaagcgacgcgcccgcggcctcgtcgcgagctgcctcggaagtcgccatcgcctcgtcctggcgaaatccggcctcctcccgagcggtttcctcggcctggcgagcccgggcggcctcctgggcggcctcctcggcttcccgtaggcgatccgcggcctctcgccggtcagattcccgcctgagggcctctgcggccgccggatcctcggcctcagactggccggacttggaatggcgggagggacgcgacgggatctcgctgaaacaaaagaaaaaaccagaagacgaacaagatgggtgagtgaaaactcgcgttgagagaatgaatacagccacgatgggtgagagacgaacctgcgagggggtcggttaaacgaccactttggaggggaaatgaggtttccccgagatggttctgtctcccccatcttacggggccgcttcttcttgcgctccccctcgggctgcgatgttggcgcggccccctccgggcgcctgttactggcacgcgccgccccgccccctcggggaggagatgggggaggtgttcctccctgcttcctcttcccccgggcgtcggcagggcggctgctccccgggcccctgtcgcgggacccagaagcacgaccccctctcggggtagattgttcccccctgcggctcccgcctgcgccgtcgtggccctttggagctcgctcctctgaggccccgaccgccatcataatggtcaggatggaggcgcggtctggatcgctgcagagggggaggattccttggggaatgagggccgcctctacggagttgagattcagcacccgttggaccaatatcttgaagtcctcaggagcccagtcccatctcactccctggtgggtcctcgtgaagtcttcggacccggtgtactcccaggcgccccgagcgcgtcgctggagcggcgcaatccgacgacggaggtagtcgccgtacaccatggcccctgtgagcccctgggatcgcaggcccgccaggcggtcgaggacggcgtcatagccatcccccagatctaccggcgcccgccagctggaggcctgcgccgggggctggctcggaagtcggaggcgcgcttcgtcggcgaggggagtgtagaaccagtcgctcttctagtcgtcccacttcttgcggagggcgcaggggatgtagcggttcagcaccggcccccgtggctggaagtagcagccaccgactaccgatggcggcgacaccgactgcacggtgaagaaccaccggaacagccgaagagatgggcgcaccccaatgaacatctcgcacagatgcgcgaagatggccaatgtcatcaccgcgttgggggtgaggtgcgccatctggagatcgtagaactccagaacatccatgaagaaagaagaaaatggtggaaccagccctgccattgcaaaggggagaaagaagacggaccgccccgggtagtctggcgccgggcgtccctcgcccagcgtgactatctcccggccggtggcagattccggcatgaagcggcgcgacagcccagcctgcctctcgctcacgatacgggaaggcggcagcacgctaccatcgagcagagcggaaccccgtgccatggcgccggaggaagagaagattaagagcgagcgcgtgtggcgaaggtagggcacaggaaagaaggagttagggcgcaagcggcgaagacaaggggaataatggcgaaaggaaggaaacagatcccttcctcagtgcctttatactcttgccaacgctgtgcccggcacctcgcttctcgctcccactatttcgccccctcgtttctcgcgcccacgcttccactaatcccattcgcccgcttgcggcgcatgaggtgggtatgcggttgtggcagtcgagatagatcatatcgtgcgcgcgttaattacgctcgccgaccgaagcgacgttaccatatcttcagacgaaacgaatcgccatgtccagatttgtgtgctactcaagtaatgtggcagtcttgaagagaccgctcattgttgacagccgagttaccattgccgatgtgcgtggtttgtgaccgttgagtttctgcccaattgtggagaccggtcccacctgtcaccaggtcttaggagtggcgtcatgcccgaccgtttcccttaaagagggcgatcgccctggcataacgccgggggctactgtcggtgacatgggatcaggagtatcatgactagaggtttgaggcagacacaatcgcacacgtggcctggtacccccgagggacgtcgggcccgagggtgatgcgttcgccctcctcttagtccccccgagggggtcgggccgcacccccctcggccccgagggccgaggcgccccgacccctcgtgggtttttgctccgcgtgtatgggttaggtgagcacagtggggctcacctaaccacatttattgcggtttggctgagcgtgtcacgccgcatgtaacgcagtgcagtgcactcgtttatccggtctgtgaccagtcacagaccggtcagatcgcgggttaggtggcgacaggcgatctgacgcacgcctcgccccatcccgtcaggacgagggcttctaggcgctcgtccccagctggagctagcgtgttacctcccagagatggcacgttagtcctggtcagatatatgccaggcttcatcctaaccattacaggcaagatgttgtgtgaagaagggcgagcatgtagattgctaagctgacacgtggtggacaagaatgaccgacgtgactggtctgataccggtcatgtcgtcagcaaacagccacgattccacgtcgcacctgctcccggcgaaagtggaggtagttgtgggccgtctcatcagaaggtgactcggacggcaactatacaaatctccgtccatttatgaaaagggggggggggggtaagtccccacaaaaaagagagaaatggtgcatgtggtatccccttaagatataaaaggaggaccttgcccacagagaggggggactggacttttccagattagaaacccagaacaagggagaggctggctgatactttgtagctccttcatacacagatctcccaaaacacaggagtagggtattacgcttctcagcggcctgaacctgtatacatcgcccgtgtcttgtgtgtttcctgtctcgcgagccttccacatacagagagcttagaatctctccctgagtccccggccgaaccggcaaaggggggcctgcgcggtctcccggtgaggagccccacgctccgtcaatctccaaaactacttcgtgaataaattccaaatatcaaaaccaataatcacatataccaattgttcatcatagaataagaatcaaaacacacattgatcttacagctaagtccaagctatccttggcctccagtttctttaatggataacaatgtcatcttttggcatcgcatccttcacggaggcatcgtttttttgagtcttctctatgtggtgttgttgtagtaggctcgacgatgattggctggtttagtgcttgtgtgtgtatggttggcgtgtggttttgagatgtgcactctgatgcacatcctttctttgcactggtggagaaaccatctttggtcggtcgaccaaattccacaatagtcccgattgcaataaaaaccaagactaaagattatctttagtcccggttgaaaaggttagagctactttttgatctttagtcccggttggttgactaaagatcatttttagtgccggttcaaaaaaggataggtgatatcagacccctctaatatctttagtcccggttggtaacaccaaccgggaaaaaagatcggcatgcacggagagatcgaggcgtacgcgtgactcggatcgagataaatatctcctcctctcctcacactctatctattcttctcctctcctccgatccccttctcctcgccatcttacgcgccgaggatcctctccttctctcctctcccccactcatcctctcctcctcccctcccctcccctccggcgggtggcgacggaagcagcagcgagatgaaggccgaccggtggcggcccggcgtgaggtggcgggatgagaggctggccggcaccggccgggcgcggggcggtggaatggagtccggccggtggcggcgggatgggaggccggccgggcaaggggcagtaggatggaggccggcctcgcactcccctcccgggcccagatctgtggatgattttttcttttcttttttgatgatttgtggatgttgatttctgaatgttgatttgtgaatgtgtttgcgaatgtttatgtgaatggttttgtgaatgtatatgttgtgaatgaatctgtgtgaatgtatttgtgatgttgtgaatgaatatgtttactgtgaatgaatcgatatgaatgaaggaaaaaactgaaaaaaaaataaaagagaaagaaccgaaggaggaaaaaaagtctttagtcccggttggtaagatcaaccgggactaaagatgcctgcgtcagtcacgtggctcaaccatctttagtcccggttggtaacaccaactaggactaaagatagatttttagtcccagttatttcacccgggactaaagatgggtatttttagtcccgtattcgtagtcccggttgtataaccgagactatatgggggttcccaaccgggagtaaagcccctttctccaccagtgttgacatcggacttttgatgaaaaacttttttataaacattttatcttatatcttaacaacattcggattacctctctcagtcatcgtggaaaaaaaaactgtccaagaagagcaatgcatatacagacttacagtacgtgtatgtagctggctagcgagtgcatactagctagtgatatcatctcagcgtattctgtttctctgtcctatgatcgatggattaattagctcattatatattgtgcaaactgcaagtaataactggtgggaaaatgttgattcagctgcaagtcatgcaggtatataacacatggatgaattaattaatgaatattaatgtaacgctattatagttgctagatggatatatatcactgtactagatataaatacatggatagaacacgatggggcatgtactgctgcttgcgttcaatctagctagatagatctgtgtttgtttctttagtagtactatatattttctggcctgcgcagcctcgacgatatatcatgcatctatatatgcatgggtaattaatgcctctagaaattaatcaaagcacattgtcgtgcatataagtatatatatatatatcgcatgcattctgtgtgcgtgtagtacgtaagtatactgtagttggtaaccactgccttaattttgctagcttgtctcgacaatttaattaaatgcctgatgaccaatgcaggtcgatcagtcatctctatatatagagtattatatacatgcatgtacgcagcaagtacacctgatgatgcaaattgagccgaccaaatttgcatgcatgcatatatatacatgtatggacttgatgcataattgattcaatataagtattagctacgacaattagcaagtcagtttttatgcatatatatgagtatagttttctcgaacagctagcgtatagtgtgcaaataccatgtatgatgtatgtaatgtgtacaaatgcaccgtatgcagataaatgtgtacgtacacatttatatcaataatgtatatacgtgttgtatatgtatctggaaaaaaagagagggggaaatggatggaaaggaaaagaaaaggaaggagtggggggcagatggagaggacgacggcatgcacaagtgacaaaaattgctacagtgaggaggatcgatactattgtgggtggggcccagtgggcttgaaggtgagtttggcccaccccaggcccaccgacagccctgacccgttactgtcaatcccccacccgggcccactgtacgtcaccccatccctcctctgcactgcattgctagcctaattcactgttcattgtcattttgtttgctcattcctatacccccgatctcgatccattttcgatcgatgtcgatggtcatatacaaatttcgcctcgactccatttcaattattaataattactccatacgttttcaaaacaaaatggcgtagctagttcgtttcaaaacagtaattcgttcacatatgcctgtgccctcctatgtactatcacacaaaccatgcaagttaacttgcgttcaatacaatcatacgttgccccgccggcaacctggcctttttcctttggagctacgctgtcggatggattattagtttatcctaaagccgcattagtatagctatatattgaattgaagtctacccatgttgaccttgcttatttttcaattatcatttcatataacagagttaattatacaaaaaagtgttatatatggagataggttgatcctgtccttcgagactaatctacgcgacactatgggctatacagccgtctacgtataactgtatatggagcccgtctcaaattatcacactagtacattttagccatgtgatggtttcttaggcagtactcccatccccccgtctcgaaacatatattagtagaatgtgttctatttatctctattcagatttcgttcttatattataagatgatgaagggaatacgttgtttgctttaccatagtaacttgctttctgcactttcatggacgcgtctcgtgtccacatatagtttacctaatttaactttaagcgttatatttgtgaccatcaattttattattgcacttttgtaaaatatataccagcttagacaattaaaaattgatacatgatgcatacgtaacacacgtacacgacttaattataaaatggttttcactggtcttcggttgctgacggcgccgcaaattgccagctaacttaaacccatttttacctctaatgaataccgattttgtagtagtgatgtgtgtcaggatcgatacacatatatacatggatgaaagtagtagatatattaatatacccgtgatccgatatttcaggatcgatcgagcgaggaagggatcggaagaagctatggggaggaggacgctcacgcatggacctgctggaccgtccggagtccggacaataataaaatcaagtgtaggagtacatgctgctccaccccgaccattgtcctcctgcattggacagtagcaatacattgccacattgcactgctgtcccctcctcccctctatctctatgctcttgctagctgtcccagctacttctcccgttttaaaatatagatatatttaaagttttagccaactgatatggaaaaataaacactcgagataacaaagtagatgaaaagttaagagatgattgttatcgaatgtaataagaaattaaacgaagagagatttattattgtatgaatactaagaatgtttttattttaaaataggagtatgtcgcgtgcaataggcaatgttggctagctacctattgcagcttagggttactttgaatcgtacgaataggaaaaggaaggaatataaaaacacatgatttttaatagtaatgtaagtggaaaatataggaaaaacataggaatttgattggaccgcgggaaaaattgtaggaatcggatgagatagatagatcgactcaaaggaaagattctcaaaaggttgaaactattgctaaatttttttcaaaatctttatagtattgtccattccatataaaatttatataaaatttttctatatgattaaaattctctaaaatttttatgtgtttcctttaaatcaaagtacgccaaatgtctccaaacaaaaaccatagctggcccctacgcacgcatggacgcacgtacattggcagatttggatcactagctagctagtgtttttcttttctttttcgtttacactagttttgattaattccctgctacatactcgtatatgtacgccgttaattaattaattaattgccattcgtcccgacatgtacaggttaataaatccatttgcacagtattttatctactgttttttaaatcttcatcgcatagtgtatagtactagctactctacatgtgttcgaaaagtttcagtgcacacagtacctatcgaaattacgttactgtggtagttacgtcacctatcgaatatatgtacttcgtgccatttactacctctaccttcattttctaatatataattttgttaaccttttgacatatatttaacattttattttttttccacggacatgaacaaatatataagtattcattagtaaagtcgtatcaaaataagtaacaattacatatttttaataaggttaatgatcaaaaataccttaaaaatcaacatcatatttttttaataatgagaagaatttcgttagaaatgaaattacacctaacttctacatcgaccagagaaactcacaacctaggacaaaagaaaccaaagccaaacataaacatattatgttatcttataccggtagaatcctaagcatctagtaaaaaaacaacacctctaagaaggtcctaacatttgtgtgccattgccatcggaacaagacgatattttcatccaaagcccgagatgacaccttcaataaaaaaataacaaacaagcattgacattgaatatagataaactagataagagttttcatcccggagtcattgtcactactttgtgccaccgtctggatgaaatgagcatgatctacgatgtgcagccaatatggacaaagtgcaagcctcctctacccaccaccaccgagctaatggaagaagtcaagtcatcgtcaagccgaaatcttggaaaaaggaaaaactacggacgaatatatcacagtgtcttgcctgatatattatgagaatggaactcgttggctcaactagatgggagggtgccacaacgcacttcaaatctcccttgtttgatctcgcttggattgcaaaccatacctggtgtcgatctggcacgtcgtggtgttgggcagagaagaaaatcccatcacaactaccgccggcggttgcagtggcgaagacggtgcataggtccaatggtgtcgtagaagcagaagctcactgtcgaggccatccccgacacaccccatcgtcacaaccgcgtcgaagttgccccgtgcccatgcagccatggtagctagcccggcaacgacgagataccacccggacgccatggccccctggatggatggggtggcggcgctggtgaaggttgatgtttgtcgccctcaggtatcatgtggagcggattactagtttatttgtgatatagtataaaccgtataacaaagttttaaatggtgcaagatgttttaaagaaaaatgatgctgccccatgcgtccatcgaggttagttagtacaattaggcattctttaaaaaaagtacaattaggcgaatgatgtctgctattatgtgtgtacgctattactccctttgtccctaaatatttgacgccattgacttttttaaacatattagaccgttcgtcttattcaaaaaatttaagtaattattaattcttttcctatcatttgatttattgttaaatatacttttatatatacatatagttttacatatttcacaaaagtttttgaataagacgaatggtcaaacatatttaaaaaaagttaacggcgtgaaatatttagggacggagggagtattatatcagtgagcagcgaaggcatcatacaagacactgcttgagcgtttcatgtacacacaaaatgcattgttaattttatttgtctgtacgtactttgtttgtagctacaaagtatcttgcataatgttcggattaatgtggtctgaatttaattgtgaattttgaacaggggaaggaagtgccgtcccgtgtgttaaattactagatgaatccgaccacgaccatttcatagatttaatttgatttgagctatatagcactgctgcaacggtttgcacggatgtgtcccactgacgcaattaaacacacaccttgctgttagcagtagatcgattcgaccatgcatagctccaaaaccaattttgtgttgaataatataaggtcagatgaaattaatatagttagctggaaactgatcaatccaatatttcgtgtcatcccggccgtcggcggcgagtccgtgtgaaggccaccgccaccagctagcagcctctgctctgccgccgacgaccaccaacgttgtttatttcagtacgacggaattaaccaacattcatgcatgcatggtttatttaaaccgattttctggaggagattaccgcccggacgtccgatgtaactcaaaatatcgaactctacccactggtggagaaaccctttgtagtcccggttcgtaacccccctttagtcccggtttccaaaccgggagtaccaatccgggactaaagatcgctatctttagtcccggatgaaataaccgggagtaaagatcaatctttagtcccggttggtgttaccaaccgggactaaagatagagctgaccttttttttttttgcatgcccctgttgctgcatggtttatatatatatatatataccatgcatatatatgcatacatatatatatgtatttatacatatatatgttatgcaaatgcatatgtatatagatatatatatgaacaaaatatatttacattatagaaaatgtgtacacatgcatatagaaacatatgtagtcatgtattaattacaatccattatatgtcctagctagctacgatttcgacgtagtagtactcgctgctagctcagaagctaaggaccggtgaattgtgtttccgtcgtagtagaattcacccttgggatcaaggatttcttcgttgatgaatcccatgagttgttcttgaaccgccgcgataaattccttgtgtgtggtcaggttatccctcatgcgaataaactatatgaatgtatgaaattgattagtaattaaacaagaaatcgctacgtaatgaaattttgaatttatttgtacgtacatcgagctctcttgtggtgatgatttggtctgcaaggcagtggcaatactcgcacacgtaatagccgcacaagttagttccctgcttttgctttgcgcactacaaataaatgacaaacaacgagagatctaattaatatacacttgtatgtatttgaatcggagaaatataaatgtagagcatgtgtactcacaggaaatttgaacttccgcctaagtctttctctccatttgccgcggaccaaatgacggaaccgataccaagccctacatggagtttaaagctatgattcgtagtagcaattaacataacaagattttcttaattaacaaaggaacttatgacggtacctgtctataagttcgaaaaccttgtcaaacgtagactcttttttatccattgagtcatatacgttgacggtgcaggcctccaggtcgatgagtaaaagcacccagtggaatatgcaatgtgcgtgggatgcattacatatgaaacacttagcaagttcgtacgggaatgaaatttggtatgtaggaagacagtaaaattaaactaactctgtgttgtatggcaacagtatgaacgtcttgtaatgctgcgccttcaggagatggacgagattgtcctctgtttcttgtggatattggtcgagcattgcgacgtttactttccgagggtcgatgaatcaagtatcgaaaaccctccgccgtcgggccctttgaatctccattctacaacgataaaagggagtatattattttctatggtctacttatatacaaggacctaattaattaaaggagacgtatagtaagaaatctaactgaacgatatacttacaaaatccagcaactcataatagagacgtcgagggcgtccagctggtatagttcgtagattccccttaaattgatccagagaatgtcatctccttgcaagaagtccgtgtccctgatcctcgctccgatcatctctctaccggtggcgctcatctccatgtacagctgatggaacttgtacatttgtgtgggtagggactgcagcagctcaggcttgacaagcggtttaccgagttcgtacatgtatttcacttccgccttttcgattggtgtgactcctagcaattgatccgtagttagaccggtgtcagtaataaattgttctatcgtcatttctttaccggtcaccaacggctcgatctcctggtttggttgctctccaagctgagggactggtttggactttccagaagatgctttcttcagcgttcgctcatagtccgatagcttgatggcctccttgacagatgcagacatacccctgaagaagttcctgacactggggatggccatgcccgacgccaccttcatgttgtgagagattatttattagtaatcaacatatataagcagcaactagcggaatggctaaatcttacctttattgataagttcttcaaaggaatatgcagctcacatggtgtccgctgagtgatgtcatcaacgggacaggtcgattcgtcctgtgtttgcatggcgtccatgctctgtgatcctacctgccccgttgaggcgcagctgctacggtttcctgacgggctcaccattgcaggaggaatggtcggctggggatcatgggaccgatgtgcggccatgcgttcatcaaccttccttgccacctcctcttgcatgttgagttcgtagctcgatacccggaactctaggtctgcaatcttcgcctcggtatctctcttgctcctcatccgactcctgtacgtgtggatgtcctccttgaaaccaatcttccaaggaatcacccctttccctcgagttcgtcctggatgctctggagtctgcagggcgagtgtcagctcgtccctatctctgtctggtcggaacgtgccctgagaggaggcttccactgcatctgttagtcgtcgcgcagcctcttgtatctgatagccgaagaccagtgagccatcagctgggttgagcgttccaccgtgagcatagtaccagaacttcgatcgttccggccaattggctgttgccggttcgatacccctctcaatcaagctagcctccatctgctcccacttcggcatcgcgacgctatagcctcctgaccccaagtggtgatggtacttcttcttggcggcattttctttgtttctttccatcatcgccttcccttgttcacctgtcttatatgcaacgaactcgtcccagtgatcccttagctttgggaatgtgtcgaagttcggtgtctgccccttcagtatatacttctggtacagatctcccttgaagctctgaaactgttctgccattttcttcagagtccaccttttcactttgtcctctgtacccgcaggaagggtgaatgtctcgagcattgtggtccacagcatctctttctccgaatctgggacaaaactctcatgatctccgcgtgcccttgttcttcgccagtacaccgtactgataggcacgttatcccgcacaacccaaccgctgtgacgtacatagttcttggcggcttcggccggggcactaggacgtccatcttcttccacttccgttatgatgtgccgaccctcaagcttcttcgctgcacctcgttgcccgcgtgccctcttctgtccaacggagggttgactaccactagcctcctcctcctggttcccctccacatccctttccacgtgcccctgctggttcccctccgcatccctctccacgttcccttcctcgttcaagtactggtttggatcctcgttcccctcttcttcattccagtactggctgcttccctccgcgattgtatcgtacaatatctgttcctcatcgcggtcagccatctgttgatacaagaaacatctgctaagtcacgagacatttatgttttaacaatctaagtcatgtatgctaagtgtaaatgtcgtacattagaaccctacacaaccttacgtgctaagtctaattacaaatcgtgatataagctaagtctaggtgacgtatattatataaccctagctagtaaataattatatactaagtctaattacaaataaaataatcttatattaaaactcaaataatattacatgctaatactaaaatagtcatgtatatgctaagtgtttcgtgcgtatatgctaagtctaattaagactacaatagtcaattgctacttgtcgcaccaattccgtagtcaataattacataccaagtctaattacaaataaagtaatattatattaaaactcaaataatattacatgctaagactaaaatagtaatgtatgctaagtgtttcgtgcgtatatgctaagtctaattaagactacaatagtcaattcctagcagtcgcaccagttccgtagtcaataatgtcatactaagtctaatttgcaataaaataatcttatattaaaactcaaataatattagaacactacacaatcttatatgataagtctaattacaggtctaataatcttaattaattgcattacaaatataacaatcatttatattattacgtcacttgcctgctccaattccttctagggctagctcttccactcaggcttgacggacgactccgacaacacgtcttttctgcaagataaaaaaaatgtattaggataaatgcgaagtaacatatatatatatatatatatatatatatatatatatacatgtatatatatatatatatatatacatgtatatatatatatatatacatgtatatatatatatacatgtgtatatatatatatatatatattgcattttacgttaacgttcgtcctcgttcgttcgctcgttcacgttccctagctcgttcacgttcgttcgatcgttctcgttctcgttcacgttgtcgtggcaacgtacgttgacgtgttcgttctcgctctcgttcgttcgatcgttctcgttctcgttcgttaacggcggtgtggcggcatcggggcggcggttggcgcggcggcgtggcgacggcggcggcggcgtggcgttgtggggccgtggcggcggcggcgtggcgtggcggcggtggcgtggcgtggcgtggcggcggcggcgtggcgtggcagcggtggcattgcgcgcgcggcggcgaaggcggcggcggcgtggcgacggcggcggcggcgtggcgttggcatgcggcggcggcattgcgcggcgtcgaaggcggcggcgtcaaaggcgacggagagagatcgagatcggagagatcgagatgcatgaagggagatgcggcggctctcaccccagagatgcggcggcagcggaggaggcggaggcggcggcgaggacgacgagctcgagacgacggcgagatacggcggcgtcggcgcggggatttgccctaggcagtggcggcgaaggagagaggccgagagagatcgatcggccgaaaacgtttaagtgttggtgaagaagacgagggcgcaccgggaatatatatacccctggatctttactcccggttgttctcaacaaccgggagtaaatatcttttcccgctatttcgaaattctttttaaacccggttagggttaagaaccgggactaaagattatagcactgcatatgattttcgcttacatatgtgtttataaaatagaagttaatgcattatacaaagattgatgacaattacttcgaaaaattatttttgtctgtaataaattaagtggataaatcgtaataagcaaatatatgacttataattaataaaaattccaatatatatatatatattcttagcatatatatgaatgatattattatattggtaaaaactctaattaagatattaatgtacatactgcatgatttaaaattaataaaaattgtaatcatcatatgtacttagcgtaggaattatattaaattaaatgctaaaaactctaattaacatatgtaaatgccacatgcatgatttaaaccttttaaaaattcgaatagtcatatataagtagcatatgaaagatagtaaattaaattgtgaaaaactctaatatatgaatgatagttttaaaaatatattaaatttaatacttttaaaaattctccagtcaattataattagcatatgaatgatagtaaattaaatgttaaaaactctaattaacatatgaaattgccacttgcgtgatttaaaacttttaaaaatcctctagtcaattataattagcatatgaatgctagtaaattaaatgttaaaaactctaattaacatacatatgaaattgccacctgtgtgatttaaaacttttaaaaattgtaagtatcacatataactaacatatacatgatttaaacttgttgaaacctctaataatcgtgcgtaattaacatatgccatacatcaattgatttatatggataatcaatacatccaaaatagtttacatcgtgtacacaataattacggcattacatcggcggtgacggttgaccgcacgtactttctcctcactattgttccctccttgtgatcgctgcgtgagtaaggggtgtcttcatttgataggaggatgctagggtcaatcgtcaccgtgaaagggggttgcccatccaactgatcgtaatcctcgtcagtcttgtcctcaactccgacgatttttcttttgcctgagagaaccacttgacgcttaggctcatcaggccctctgcccttctttcctttgctagacatgtccttcacgaaaaagacttgcgttacatcattggcaaggacaaaaggttcgtccgagtatccaaccttgttaaggtcaacagttgtcatcccactgtcatcaatcattacgcctccaccagtcaacctaacccattggcaccggaacagaggaaccttgagaggaccatagtcaagttcccatatgtcctcgatggcaccgtaatacgtggcagttgttccatcgtgtcccatggcatcgacacgaacagcgctgttttggttcgtgctcttcatgtcttgggctctcgtgtagaatgtgtacccattgatctcatatccctggaatgtcgcgatcgacccagacggtcccctcgccaggaaggcaagttgttggttgatcgactcgttacccatgagatgttgtcgtagccacgcggggaaagtatcaatgtgatgccgtgtaatccatgcatcggacttaccgatgttcctggcgcgaactagagccaagtgctcctcgatgtaaggagctaccaatgaagagtgttgcagaacagtgaaatgggctttacggaataaattgttgtctaccgtcattattgctttccttccgagagttccctttccccgtagtctcccttcatggcgtgattcaggtaccccgattgggcgaaggtcttcgataaattctacgcaaaattcgatgacctcctctgttccataacccttggcgatgcttgcctctggacgagcacggttacgaacatacttcttcagaacgcccatgtacctctcgaaaggaaacatgttgtgtaggtacataggcccgagaatacggatctctttcacaaggtgacaaagcagatgcgtcattatattgaaaaatgaaggtggaaatatcaactcaaaactgacgagacattgcaccacttcattctgaagggcttctaatctatccggatcgatgaccttctgcgaaattgcgttcatgaatgcacatatctttgttattgttgcccggacattgtctggaaggataccccttattacaactggtagcagttgtgtcatcaacacgtgacagtcatgagactttaggtttgtgaacttcttctccttcgtgcttattattcgcttgatattcgtggagtatccagacggtacctttatgctctccaagcattcaaacatactttccttctctgccttgctaagagtgtagctggctggactcaagtaatggcttcctttctcctttggttccgggtgaaggtcgccgcgttgttccatatgcttcagatcattacgtgcttccagtgtatctttcgactttccgtatacacctaggaagccaagaaggtttacgcaaaggttcttagtgaggtgcatcacgtcgattgcgtggcgtacgtccaagaattcccaatatggtaactcccaaaatatagagttctttttccacatcgccgcgtgaccatcttcgctctctatatgctggcttccaggcccctttccgaacactactttaagatctttaaccatagcaaacactgtttttccgctgcgatgtttaggcttcgtacggtggtcggccttatgttcgaagtgcttgcctttcttccgtaccgggtggtttgctgcaaggaatcgacgatgacccatgtatacaaccttcctacagtgcttaagatacgtactttctatttcatccatacagtgagtgcaagccttgtaccccttgttggactgtccggataggttgctaagtgcaggccaatcgttgatggttacgaacagcagcgctcgtaggttaaactcctcctgtttgtcctcgtcccacacggggacaccttccttcttccacaactgtttaagatcttcgaccagtggtcttaggtacacgtcgatgtcgttaccaggttgcttggggccttgaataataatcggcatcattatgtacttcctcttcatgcatagccagggggggaggttgtagatacacatcgtaacgggccaagtgctatggccgctgctcatctctccaaaaggattcatgccatccgtactcaaaccaaaccgtatgtttcgtgtgtcctttccaaattctttaaattttctgtcgatgtttcgccactgcgaaccatcggcggggtgtctcagcatcccgtcctgttgacgctcttcagcgtgccatcgcaacattctagcattccccttgttcctgaacaaacgccttagccgtggtattatagggaaataccacatcaccttagcaggaattctcttctttgttagctgcccgtcaacttctcctggatcgtcccgtctaatcttgtatcgtagtgctttgcaaacagggcatgcttctaggttctcatactcctcaccgcgatataggatacaatcgttcggacatgcgtgaatcttatgaacttccagtcctaacgggcagactatcttcttagcctcgtacgttgtctcgggcaatttgtttccccccggaagaatgttcttgacgagtttcaataaatcgccaaatgccttgtcactaaccccattttttgccttccattgcaacaactccagagtggtatccaactttttgtgcccctgctcgcaacctgggtacaacgaagttctgtggtcctccaacatcttgtccaatttatgggcctccttttcactttcgcagtcttccctggcgtcctgcaacatctgaccaagatcatccgcaacgtcgttaccatcagcagctatttcctcctcgcccgtttgatttccttcaaatccaacatactgagcaaagtccggaatattgtcgtcttccacttcatcttcttccatttcaacaccttgctctccgtgggatgtccaacaattatagcttggcatgaaccccgactcaaataagtggaaatgaatagtcctggatgcagaatactccttctgattcttacacttattgcatggacaacaaataaaacccctttgcctgttagcttcggccactctcaaaaaatagtgcacgccgtcaataaactctttggaccgccggtcagcgtacatccattgccgatccatctacatgagtcaaaaaaaccgcacacaaataattattcttacaataatgacagtcatacaataattataagatatctttattcatacaaaaatcataaaatattacaccaaataattcttaaaaactatttgtaaagttttaaactaattttaatgtgttttacttcttttaatttttattttagtttgttttctattatttaatattaactttcactagagttttccttctcaactattttataaaaccttgtttagcaaatgaactaaatttctatatattctttcttccccacacacattttctctctcatcaacttacaactaaattttggagacaaaaaaagtgtgcaaaacataggtgcaaatgtagtatgacaaaaaaaacattggaggatgaagttgcaaaccttttaggcacctccgatttgtatgtaatcaccaaaataaattcaatagaaattttggcatgacctcccctcttttttgaagaaattttgaagcttgctcgggcagctggaggaggaagaagacatatatataggggtgggactttagtcccggttggtagcaccaaccggggctaaagatcaccgggatcattagtcccggttggtattaccaaccgggactaaagttaagatctttagtctcggttggtagcaccaaccggggctaaagatcaccgggatctttagtcccggttggtattaccaaccgggactaaagttaagatctttagtcccggttggtgctaccaaccgggactaaagatcccgggggggcctgacaggtcctgacagcattcgaaccgggactaaagatgatctttagtcccggttggtaacacaaaccgggactaaagatcaaatatgcccgttacccttttgaaccgggactaaagatcatctttagccccggtttttattgcatccgggactattgtggaaatcggccgaccgacgaaagatggtttctccaccagtgacccgagtactatattagcaagctgatcacataactgctacatgcatgatgatactacatacatgcactgattaacacatactagtaacctttgagataatttatttttatttatttgattgtcattttgattatatggttgtattcgttataattaaatctttacaacaagatctcagaaggttatattttgattgaaaaattatatatgttttaatcgttaagatttaatgtttcacgtgttagaaataaatgttccatctagaatttgattatgttgcacattttaagttttttatctgatagatgttgttttactgttgcacacgggatcaataaatatattatgatgtttcattacttatttgtggatgttgcacatcgtattatttgaatgtttcatcaagtatattgtgtgcaacagttacaaaaaattagtgaaacataagaaaatatctattaaaacatctaaataatactgtgatcgacattttgttgcaacggtaaacttaaaatttgtaatacaaagtgaaattccatttgaaacgtttatttctcacacatgaaaatctaattgcacatgctgaaaaacacacacacacacacattatttttttcatcggatcatgtgagatcttattacggtgatcttcctataacatagaaaaacaccacatgcaatattacaaataagtatctgaaacatcaaccaatatttattgaaacattccaataacaccgtgtgcaacactaaaaaggtcatcagaatacaatgatgtgggatattgttccgaagatttgattataatgaatccaactacataatttattcatagtttggataaataggtggaggaaagaaacatttgaattctccaccattatgaacagttttactaaatctgagtgcatgcacggatgcacctacaccaattgatgtgtacgttcgatttcttccttccacctggatggctgatgtgaagcatttttccgattttgttaacacagtaagtaggagtactccattggaacatgacgcataatactactctacttaatccgtaatatgcggaccatatatatacatatgcctatactatactccctccgttaaaaaaaagccaacctctctcgtaggttagcttttgtttttttacggaggaagtgcatatgtagagtgggtatgcaacagggtttatgttaccgtcggtaaccgcgcggttaccgcttttaccatgggggtatggtaatagaaaataccgcggtaatctcctttaattcaaataaatttaaaaaataatttaaatttttaataaattttacacggttatcacgtgctgcgcggtaaccctagcccggcggtttggaaaacctggtatgaacaagccgtgacgacgtgagtgaagcgtggcgtggattggataagggaggagaaacaataactccctcctcctcctcctcctgctcctagtactagtagagcagcggcggcaatggcggcgcctcctctgctgagcctgagccagcggctactcttcctctccctctccctccccaagccacagctcgcccccaacccctcctctttctcccccacgcgcgccgcctccaccgccccgccacctccggaaggggcgggccccgccgcgccatcccgcggggaccgcttcctcggcacccagctcgcggccgaggccgccgcccgcgtcctcgctccggaggacgccgagaggcgccgccgccgccgggagaagcgcaaggccctcgcgcggaagccctccgccgccgcctgctacggctgcggcgcgccgctgcagacggccgacgaggccgcgcccggctacgtccaccccgccacctacgacctggtagtactattaattcttccttctccacccacccatgacatgattactactcctacgtagtaagtaataatatgcatatgaatgcatgcgatgcgagcagaagaagagacaccatcagctgagaaccgtgctatgtgggagatgcaagctcttgtctcatggccacatgatcactgctgttggtggccatggcggctatcctggagggaagcagttcgtttccgcggaccaactcagggacaagctctcctaccttcgtcatgagaaagctttgattatcaagctggtaaatcacaacatgccctgccctgccctctaatgtaatcaaacgcaatggctgatgcaaatccttcacatcttctatgcgtctgcctcttgccgctcattctcgctgtttacatgcaggttgacatagttgacttcaatgggagcttcctggcgcgtgtgcgcgattttgctggtgctaatcctattatactagtcatcacaaaggtgattcttctacatactgcatgcatattcgtgtttcaggattaaaagctcattcttttgtaattgtaggttgatctccttcctagagatacagatttgaattgcattggcgactgggttgttgaggcagttgtcaagaagaagctcaagtaaaacttcttcgcccctctttctgttccagtaactattgcatcaggttttccatttcattaattggaaattaagcgtgcttcttggcatctgtagcgtacttagtgtccatttgacaagctcaaagtcactcgttggcgtcactggggttatatcagagattcagcaggaaaagaaggtcagcatgcaatctgtatttgttttcccagttatattgtgctaacctgtccccctgtaagccttttccaacacttgccttgcacaattgaatggtagtttttattgtgtcatatgtacacttatttcttcacttccttggctgttatacatttcataatactgatcataatgttgttcttcctttcttgttagggccgagatgtatatatactggtaagcaataagcactctccatctccttttttcaattatttatgaactcttgtgctacagattttacaggcataccattgtatttttgtatggcaaaacactaagcttgctgccatttgtacaaacctaacaagctgcattcatatatcaacaaatgttgatagcttgatgcttataatgttctattgatacctgatcattatgttagtaatattatggaaagattcagaattggatgttacccactaactaacatacatagacccatcttcaggttctctccttcatttttcattatttacacagaatgattgaaccttgcaattcataatgcttcaaataacatgagtaatttatttatgcctaatgaatctagtacaccattacagggttcagcaaatgttgggaaatctgcatttataagtgctatgctaagtatgttcttaccattcttgactactattgctgtctccctttttcaacctattacttgttttgttcgctcattctgttctttgttacactaatagttagagaccataatttgtagggacgatggcatataaggatccagtggcagctgcagctcaaaaatacaagccgatacaatctgctgttcctggaacgacccttggtcctattcaaattgaagcatttttaggaggcggggtacggttccatcttttactctgtacactttagttttaagatatataatatgccaaattttcttgttgacctgctgtaccaactttatctatgtagctagagaatgaacttaaatgttgtcttatatattgctaacatgcccaaccaattattatacttctctgacacatgaaggactataataatcttgaatacatgcagaaattatatgatacacctggagtccatcttcaccaccggcaagcagcagttatccatgctgatgatctgccttctcttgcaccacaaagtcgtctaagggcacggtgttttcctgtatgtatttgtattcagtggcacacatgtttctttctcaaaacatgcacactaatcttttcttcagaatataatgttgtgttcaggctaatgatacagatgttggattgagtgggaattcattattctggggtggactagtccgtattgatgttgtcaaggtgcctagttgagcccaatttcaattccaaaaattttctaccacttctatttttttccattctgtagtacttaccactgattattaatcaatcaatcaatcaatctaggctcttccacgcacacgactgacgttctatggacccaagaagctaaagattaatatggtcccaaccacagaagcagatgaattttatgaggtacacctgtgtttgctaatcagacaacagtatgcagctaatcatttgttgctaggttgagctacttagaaagcatcaagctactggcatactgttttgttctcaaagttctatcaaatttagattagtatttgcaacccacatacatacctcttcctttaaatatatatgctcatataacttccatgccttccacaccgatgctcacttgaaatctctatggatggtataataactgcatctatttgccatagttcatgctttctatatttctgttcatctaagaaaactgaagaccataacatgtaaaatagccgctaattaaaccagcttctgttctatgtgctatgtgaatcaggtaaataataatagtatgtgttctgctgatcagggtggggttcgaaatggcttttttatttaacgagttgtctatttcacctttccagagagaagttggagttacattgactcccccagctggcaaagagaaggctgaaggatgggttggtctgcagggtgttcgtgagttgcagataaaatacgaagagtctgataggtaactccttgcaagatgcaagatggcttcaattattcatctagcatgcagtaccagggggctttaggatcagacaattagtggttgagtaattcagatctcatgtttcatgaagaatatggtgtgtgttctctccaagcatctgctttcatatgttactgacatttgaggatatgtttgttgtgcagacctgcttgtgacattgcaatttctggtctcgggtgggttgcggttgagccacttggtgtgccatcaagcaacccagatgagagtgctgaggaagaagacaatgagagtggtgaactgcatttgagagtacatgttcccaagcctgttgagatctttgtccgacctccattgcctgttggtaaagcagcatcgcaatggtacagataccaggagttgaccgaggaagaagaggagttgagacctaaatggcattactgatgcttatagctattttagttacgatgacagcatcgtgtagtccaaatagagcacgtaattatatatgttctcagatgatgtgatagggatgacagttttagcatcagctgattaaaattactccaataatgattcaggaaggaattttggataaagacatcgacaagtgaagctcttgcgggtactctctgtttctaagatcttcgtcctagcacatataccatcacatcatttttcctttgcaacactatgtgtgacgcactgacgcttaaagcgaatgccgtaatgaatacttgaatatagttaagaggcaacaattttttttttcagatctgaatctaaaaccaaccaaacacttttcaacgggtctccaactccaacgagagctatcttccaccagagttaaagtttggagccctaccaaacgggccttcatattcggccaatgccttctatatatgttctagcttagcattcgcaacgtgtatactcaactgtcaactttgtggagctatatatagaatttatttagcaaaagaaaagaaaaaggaagaaaaaagccctacccagaaaacgtgtatccaaaatacgttttcaaagttagaaagcgcattaaaagcactacgcaaaagttcttggtagattttggttcggcccattggatcttccgactcacacgcaccaccatgaccgacgggccctcgaccaccggcgattcgccgccgccgccgccgccggagagcggcggctccatctcctccatggttgcctcctctgccgcctccgctgcggccgcggccgcggatttcactcgccgtggcgaggccttcggcgccgatatggcctccgcagctagggctgccatggacaccgccatcgcccactctcagtcaaccgccatcgccgccgcagaagctgcctcctcggccaaggccgacgccctcgccgccttccccagcctcacgctcaacgcaaaggtgccaccttcttgccccccattccccactcgctccgatctcagcaaatttgctaaagctcgatttcttttggccttttcccccctctaatctctaatgttaggaggagttcgaatggttaaagaaggagtacacggttcacgagcaggtggtgttcggcaagatcaaaggtgcattttcctgttacttccgtaactcaaaatccagaaatttacagattgatttgtattgttggcctgttttattatgtataacaattgaatttcgattgcttatagatcgtgttgtctaacatggttctgttcttttgatgttcgatcaattattgactttcagttaccgtgtttgcagagggtgccatcatggccatcgagcatccgggaattgctgcaggctccacagcaattgctggaattgtgctcttcaaaagtaaataccatctcctgaaagtcatttctttggtggcttacttcttgtttgttacattcacaaaagaatacctgcttctgtaatgctttacacatgatacactttagatgatatgaagagggtacctgtcagtaccatatgttaaaaatacattgaatccttttatgtaacacaagttagaatgttggagcaaagtgttccttaatattttttgtaacaacaaagatacgctattggaagtgatttcttatcatgctacttatagttgactgaaatgtactgagaccttcttgagctaattaattagatccaacttagaaatcacaagcagattcagttcaacctgtcttattataatcatcacattattctgattaattggatttcattaattctataagagtgttgtgaaattcactttcaaattatcagcctgtacatgcagagctagttgcctagcatctgatgagacaaggatgttgatgcaagtttggtctgtgattgtttcaagaatctaaaatgttcggccttttcttatatatcactaactttagtgtgactaaattcgttgcagggccaaggagctacctgatccaacgggtgcgacgcatatttgtaagcaaggaggtacgcactgactgcctgtctagctataacatttctatgaattcttgacattgctacttgctacctgcctacctccatgtctcgaaagttgcatacaccatcttgtttacagattgtcacctccttactacttgctgactagcttcacagttcgaacctatcagatgtaatgctttagtgctcattattactgtcatggacatgttgtgatacaattctttgttctgaaacagagcgaaacacaaattcgtctaaaactagcatacatttttttaatgaaattcatgcatgctacctacattcatgaaaaaaaaatacagggttgattttctttagaatgaatacaacctatgttgattgtatttcataagtttccaaattgcagaccctactttctggcatccaagctggcgtgaatcacatgagacaaactgtcaatcttgtgtccaatgaaagccaaaagttgctggtatatttctttattttgttgaaaactgaaccatctgttgtcaaattggccatttaagttcaaacattcttcatgtctgattttgtgtatgcattccaggatagagcagcaactgctgaaaaaagatttcagaaaggatggaacacactcaggcaagcctattttttaaagccttttaccatttatttttgtcttcccttctctaatacagcattggatttgctgtctacttgtttcagggaagaagggcgtgccattcaaagtgagctgaaccaaataagtgatattgagaagcaagcagtaggtgtgtaataatttcttgcgctattgccttttcctatgtcaatttgaattttagagcggaaattgcctcatcttgaatttgacatataatgagttgtgtcctataggtctcaagagcattctcaatcagcttcccagagcacatgcatctgagtttcaatcagaggtcagtatattttctggtatctgaacactatgatgtttactgaaacgattaggtgatgttgaagctgtcactgcaatttgtttttttcccatgttgtgcaaatctgttggctaatttctttgccaaaaggagagggtatagaagttttattcagtcaatgtcggcatcgattttataagtagtgtgcagaaattatttttcatggtttcatatctcataattgcagcattacattattttatcacaaaccagttttacactaaagataagatagtattttgaagatgggagttctgtaatgttaatttatagcaagcttatttttttaattgcagatatctggcctagcctctcaggtgaagaaggagaagagagtacttaacaacaccctcacgaagattgcgaactatggtgtccctatctgactgtcgaaacgcagcttcatttgctgtagtttttatcaatgaagagattctgaagacatgggtgaatcttttactttatactacttgtccgcggaggggaaaggaaataatacgttttatcagtcttggcgagatgtaaatttgccgctggtgctgcagcagcaacataacatttttgtagtgttttgcatcatatgggcattctctgttgcattgtccatgaagtgaaatggacatactgcgtcgaccttccctgcaattaatcaaattatgttttttttttaagtgtgatgggtgcgagactttatgtgcttcagagcgttaaagtggattcaagaaaactttttttctttatcaaatctgatgaagtggttacaattcttcagtactgtataacggatatgcttatgatactattatggctggaaatagaggattgatagggaagatcgccctcaagtcgccggcttctccggaagacggaggctctgatctgattgacttagtgggcaaggcccttaatatctttattgcttagtccttaatacaatagcaggccccctttatatactaggtgccaatctaatatttaggaaatctaagacaaactaggaataggaaacataatcctaaaccaactagaattagatatatctactgattattcctattcctattcctatacctatggtatttgattccataacgccggtctataacatttccctcctcctcatgaaacagctcgtcctcgagctggaaactgggataagcttcgcgaaaatggtccagcgtttcccagctagcctcctctggagatgaacctacccattgtatgataacttcttgaattccttgattccacctagctttgatagcagcagctggtgcagggataacctggccatgaacaatgtcaggaacctgaacaatatctgttggggccacaccttcaattttttttagtaaagccacatgaaaaacattgtgaataagagctcgaggaggaagcttgaggcgataagcagcatgaccaattctctcctcaattaaacaagggccataaaatcttggggcaagtttagagtgtgcttggtctgtaataccagctgccatgcgatggtgtaaccgtagccatgcctattcaccaacctcaaattcaatgtcgcgatgagatttatcataccaactcttcatatagtcctgagcttgaagaagtctctctcgaatttcaaccaaaaatccatttcgactcctcatctatttgtccacagccacaacacaggaagaccctggctggtaagcagaaatagtaggaggatctcgaccatacacaaccttgaaaggtgtctcacgaagggaagtttgataggaagagttatagcaaaactcagcccatggaagccactgtaaccaattctttggatgatctcccgaaaggcaacgaagatacatagtgatgatgcgattaaccacctcagattgaccatcagtttgcggatggaaggctgtgctcatatttaactttgtattagtgaagcgaaatagttccttccaaaatgtgctagtaaaaactagatctctatcactcacaatagaacaagaaataccgtgcaagcggacgatatcatcataaaatgcctttgcgactgagagagccgtgtatggatgtcctaaagcaataaagtgggcatacttagaaaaacaatcaaccaccgtcaaaatgactgacttccctcgaacacgaggaagaccctcaatgaaatccattgaaatatcctcccaaacagcagaaggaactactaaaggttgcagtaagcctgcaggatgtcgatgttcagtcttgttttgttgacataccgagtagctcttaacataatccttcactaatgaactggcatgaggattgtaaaatgatgcacgtaggcgatggagagtcttctgaattccctcatgtcccatcccgtgcgcatcagccaagagcaagggccaacatgcagaagctgtaggaacataaatcttgccctcaaaggtgaccaaaccatccactaaagaccaacctgtcgtaagtaaaccagcctgaatctgatcccttttggtaatgagttctagcagtgtgttggtctcttgtcgcaataaatcaaatatttcaaaagatgggccagaaatagcgtgtaattctgctgattcttcacgacgagataaagcatcagcagctccattgtgttttcctggccggaactcaacttcaaagtcatacccgaataacttactgacccaagtatgctgtggaatagtagacagccgctgatcaagaagaaatttcaagctataatgatctgtacgaatcgtaaaggatcgtccccaaacataaggtcgccaatgacgaacagcttttacaagtccaatcaattctctctcataagctgcaagcttcgcatgatgaggagccactgcacgactaaagaaagcaattggtcctgctccctggtgtaaaacagcaccaaaacccacaccagaggcatcacaatcaataataaatcgtttagtaaaatccagaagttgtagcaaggaagcagatactaaggccttctttagcgctagaaaagcaccatgggcctcagaggaccatgtgaacccttccttcttcagaagcttggtaagaggagatgctatggcaccatagccatcaatgaactttcggtagtaaccagtgaggcctaagaatccacgaagagcgcgcacagtgcgaggttgaggccactccgcaacagcctctaccttgctaggatccatggccaccccacttgcagaaacaatgtgtccgagataagtcaccttttcttcaccaaagagacacttggatcatttaagcaccatttggtgttcttgtaacaccaacaaaactgctctaacatgttgaagatgttctgcccaagaagaactatatatcaaaatgtcatcaaaaaatacaaggacaaaccgtcgtaggaagggagccaatatgtcattcattaaggcctgaaacgttgctggagcgttagttaatccaaaggccatcaccaagaattcataatggccatggtgggttcggaaagccgtttttttgacgtcatcaggatgcatgcgaacttgatgataaccactacgcaaatccagtttggtgaagaagcgagcccctttgagctcatcaagaagatcatccaccaccggaattggatatttgttctttatcgttttgctattaagggctcggtaatccacacaaaaacgccaagttttatcttgcttcttgacaagtaatactggagaagaaaattcggaatcacttttctggatgataccttgggtcaacattgcagcacattgtcattcaatctcatccttcaggagttgtggataacggtaaggacgaacagccaccgctgctgtgtcagaaatcaaaggaatacgatgatcatgacttctttctggtggtagtccacttggctcattaaaaagatcatcaaattcttgcagcaactcaggcaataagtcacgtccagtcaaagcatgagcctgcggcggaaaagaatcaccaccatgaccatgccaagctacttgatgatcgtccctccaaaaagacatggtgagcttatcaaaatcccacaagatgggtcccaatgtacggagccactgaacacccaataccacattatagcctactagtggaataacataacaatcggtgatgaaatcctccgagtcaatttttataggaatacctgagcagatgcttgagctagtgacttgatcaccatttgctaccataacgttcagtccagattttgtggtaggcgagaggccaagacggtgtgctgcctcagtagccacaaaagtgtgggtagatccggaatcgaccaaagcagacatggttacacctccaataataacagccaagcgcatggtcttgctagtacggatgccggtcaatgcatgaagagagatggtaacggtgtcatcattgatactatcatcgtcctccccctcgtccatctccaagaggtagatacctttcatagagcactgacggtgatgatctttagagaatttctcgggacaattgaagcaaagccccttttcacgacgctcagccatctcagctgctaacaagcgacgaaaccttgtgcctgtagtacctggccttgtaggtgatttggaagcaacaatcgcagcagaagaagacgtgctactacccacacgggaaggtgctggagcagaacgaaaagaaagtgcagaacgctgtttattctccacgatacgtggagcagcgactgcatcatcttccaaccgctgctcataagagcgtgccaagctcatggcggcctgaagattagctgtattttgaagctcaacatcaatacttaaaggcttgccaaggccggcagtgaaaagattgacttgatgcatcggattgagagatggggtaacacgacaaagaagagccaaaaattgtttttggtattctgccacagtcccggttcgtcgaagtgcggacaattcaccaagaatattgttacggatgggaggaccaaagcgcatattaacaaagtgctcaaaaactgaccagttcacgagtccattatctttggaaaattgaatataccattgttgcgcctcacccgtcatgtgataggaagcaagccagaccttctcatcctcaggcgtccgttggccttgaaagaattgctcacaccgattaagccaggtcaagtgatcttcttctccatcaaatattggaaaggttagcttgtgataacggggaacaccacgtttgtcatcatccagattagcaccactgctccctttttcccatgaatcttgccgagcctcaaggttatcaagtttcttcatcaagagaacaagtgtcttggccaaatcagccatggttgtgctgtcttccgacatggtggagagctaggtataggtggtggctggggttggttgacggtggaacacaacagatgtagcggcggaagtgacgcaagcagcgcgaatgtgaggcgtgctgcgtcgagcggaacccagcgacaaagcaagcgctggatgagggctctgataccaaatattatggctggaaatagaggattgatagggaagatcgccctcaagtcgccggcttctccggaagaccgagtctctgatctgattgacttagtgggcagggcccttaatatctttattgcttagtccttaatacaataccaggccccctttatatactaggtgccaatctaatatttaggaaatctaagacaaactaggaataggaaacagaatcctaaaccaactagaattagatatatctactgattattcctattcctattcctatggtatttgattccataacgccagtctataacagatacagtatgcaatcagattttgtatttgcatgaacacctggagtcaaagaatccacaggttagatggagagaattttgtaatttgaattgagtaaatttcatcattagcacaaagatgagtcagtttcaaacagtaaaaccataaaattttaagggtgctaataaaaaccacaggaaacacgataaaaatgtttccgaaaattaacaatcgactatttttaatcatcaattgatatattatagtactatatatagttagcagatccaacaaatgacagctgtgtttagtttcacactaaaattgaaagtttgaaaaaattaaaacgatgtgatagaaaagttgaaattttatgtgttgaggaaagttccgatgtgacgaaaaagttaaaagttcgaagaaaaaaaaattttaaaaaaattgtcctgctcttctcctctccccctcccttgtttggagaaatttaatatggcaacgccgccgtcgcccgtccacgcgcagtgtcgacttcctctcggccgcgctagggacccacgccgccgccgccgccacgtccgccttttccccgctccgctgctcgcctccccagcctccgtccgtgctcccctaaaagcaggaggcggccgccgagaaggagaaggcgccgcgaagagtgagagcggggggctagacctagtgcaatcgagccttcatcggcgccaccgcgggccatcgcgtggttagccgccggagtcgggggtgggggggatgccgcgggagccggccgccatgcgcgtctacacggtctgcgacgagtccaagtgcgtgtcgcatcacaaaccctacctctcctctcctcttccaatgcattgaatccctcttgatgattcaggtacctcatcgtgcggaacgtcccgtctctcggctgcggcgatgacctcgccaatctcttcgccacctacggcccagtagacgagtctgtctcttcctcctcccacctataccataccaccacctgcctgtgtgaatgatttgcttgcttattcaggtgcacgcccatggatgccgaggactgtgacccctacaccgacgttttcttcatcaagttctcgcaggtcagcaatgccaggtgagtaaccaaaatagtaccttttctttcagtcctttttcctgttcaggaagaaccgacgttcacagaatgagtgaaaaatgttactagccaccattaattccaacaattaaatttgtgtttggtagtcttttctaagacaaatttgtctccttctcatccctgttttgagctctgtgcttaggattacagctttagtttagtttgttagcaattgggaacaaatctggacctactatttgccaaatcgcaagtttattttctcaatgaaagcaagaaacggcattaattgcaggtttgcaaagaggaaattggatgagtctgtatttcttggcaaccggctgcaggtgtcatacgcccctcagtttgagagtcttctggacactaaggagaaactggaagtcaggagaaaggaagttcttggccgaatgaaatgtgtgcttccatgttcttcttttccccctaactctatgctgtttagccttcgttgtttcaatatgtaaccgttttctttctacgactacacattgctagtttatcttgcttggatagttatatataaatgtttgctttcatttctccagcatcttctggaagacctgaagggttatctcatcattctccaggtcagggatcatctgctgcaaactcacaccgtcagatgagctctaataaaaggttaacatattgcgtactactatcagtttttttttgtgtgtgtgtgtgtgcaaacattgctaaggagaacattggtcatcagttactcattgatcggcccagtcttcaactaaattctatccctgttaaccatgccatttggaattggaagttaccctcatatccacatctttattgatatatgacatctggtctgaatatttgaagatggatacccagtctttatgaatagcttagcagctaagctacagtgggtttaccgaacaaaactgagatctttggcacagtaaagttgaaagaaaaaccagcaatccttattccttaatcaaaagactgagacacttcttctagctttgtgtttggtttgctctttagattttatgcatcagtttgtatatttcatactcagcactaccatgtaggagtatcaaccaggatttggtttgttcattttaaggaatgaacttcaattatgatacaattacatacactcgccttttatggaatattttcaaactttataagtaatattgaatgatgtggaactaagatggtaacccaaaagcccatctggatcttctctgattagaagtgtaaacactgtatatgacttatctagtgaagttccattttgccatcttcagggaatacacaaaaacacttcatgcttctcaatttgaagatcctcgtttcactcatgtatcctctaataaggtatgcagtacaacagtatgtatcctctaataaggtatgcggtactgcaaagtaatataatgtttggaatttggactctaggtgagaaaccaagaggttattcattgagaaaaaatatggcattaaattagcagggcatataatggtgtaagccaactttcttttcagaaaaagaaaaacagaaacaggggaattaatgcattgagtcatacatagtacctggaaaggcaaattctgcaataatttggaattttgtatatcctgccatattattgaacttagtattcttaccaatttgtggagaaaatacttctctgtaggattattttccatctgagtcgatgaatgcaacagtaaacctagtcagggagaagcttgataaggtaagagtatctttgttaagtgtattatcatattcactgcaatatgtgcatttgtggataagttaaaggttccattttcaaaatttcagatacaatccagcagcgacaattccagtgctatagttgcacccaagaaaccaaggaccgataaccgtagacgaatttgatatcatgggatggagtagaacatgcatttttttttcttcatctactttcttgtagtttgttttataattggcagaaaatagtgtactataatgctaaatgctgtctatattctccctcagttgtaaaagtatccccttttaggttttctgcggaagtaacgttagtatcatgttttgacgtggattaatgtcatgtttgatgagcacatttctcttcgtgaaaagtccacctttcttttgaacaatttatatttgaaacatcatgttctgttggtatactgatttatctctacagttatgttctatttggatctcaaatggttcctatgaggttgtgacatctgtgttatggcatgaagaatttcatgatgtctgatataggagaaaaagatgacctctgctgatcagatgtactccctccgtaccacaaaaaaaccgaatctaggactggatgtggcacatcttagtatgtatgtccagattcattgtacaaagatatgtcacatccagtactaggttttttatgggacggagggagtaatagatagcttacatatactctattcggtcataaattgttgacgtctcggacaaaatttagccggagttttgaaattccctaaccacccgtatccttttcttttcctaacttcaagttcgagtcggatcccgatgcctatgtactatgctaagagcaagtacgatagggatgactcaatactccctccatcttataaaagaaaaatctaggactgaatgtgacacatagtataacgaatctagatagatctgtccagattcgttgtactagcattaagaacaaaagatagtgcagtcggctgtagaattataaccaggctatagcacgtaaaaagagaagatacaataacttgtccgcttctattagctatggagcatagatagtgatgggcctaataaatttgtatcaaataactattgtgcatgctagctactaaaaaaactaacttagactatagttagctgttggctttattattgtacctgctctatgtgtggaccttgaacatcaaacaatcagatctcgataggctattatacttaaatatagatataatattgagccgtacatttcgatgcctatgtatatgctactatcttcgtcccaaaatataacaatttctaactatatagatagaagttactatagtttataacatagagagtatgtaagcgtcgtttctcaaggtctaaaaacaactgggaagatcaaaatgggaaaatgagggagaaatatatagagatggaagagacgaaatggaaaggggaaatgaataatgcataataaaggaaaaaaaatgacaactgaattttttttagtcggacgacctcattgcccaacttcttgtaaaaagaaattaattaaatccggaaagcacaaagtaatagaaaaccatctctctcgcgatgtacaaagttgctgacaaccataaacgtggcaactttctggtctggaattcttgcgtgggaaagccgttaccacaatattaacaggaatagaagaaaggtggttactattaagtcttcgtgatagacgtaccatgacaatatttatattaggtgaattttcaaatagtggaatataaaatgccagcataaatatatctttacctctactattataaaaattaaagatgtttttgccggtgctttggtaagtcatccgtatatgagttggtttttaagttcgttttattttgaaaatacatatccgtatttgagtcagtttttaggtccattcgctttcgaaaatatagaatgagttgtataagaaatctcttaaaaaaactcgcatactaacttgaggcgatcggaatcctaaattcataattgaagctcatgattttctaaaaaagggcttgtttggtacagctccaactcctaaatataactccaggagttgagtctggagtggagttgtggagctgccaaaacccagctcctcaactctagtacattttgtgagagagctccacccaactccactcccaattttggtggaactgaaactgattggctgagctccagctccaggaggggtgaagctggagctagagctgtgccaaacagacccaaagtatatatccaaacaaatttctacagtgaattttatcttaactaaactgtataacaataataagattaaagtaactttcacccgtttgcaacgcacgggcatttttagtggaaataaaagagaaactcaaggagtaaaagaaaaagaaagcgaggaaaagagaaaacagggggagggagaggagagagagacatcaagcaagctaggaacaagggaagggaggggaaaaaactgtaggatctcccccgacaacaaaagaagaagaagagaaaaggatggcgatggcgatgcgacgtcgggtgtcgtcgtgagcgcagccctccctcgcgatccacctaccccgccgccggtaagcctccacctccgccattcctccccccacccaaaccctagatccacaccctcctctccgcccccgagatctcctcgatcccgtccgcgattccacgccgacatggctgaccccttcgtcgccgacgaccagaccgacgccgacttcttcgacaagctcgtcgacgacgacgacgacctctcccccgcccctgcccctgcccctgttcccgcccaacagtcggcggaggcggccttgcttccagctctttccgacctcagcctcgccgacgatgacacagacccttccccggctcctcctcccgtcgaggccccgccggagggtgcctcaccggagtcggggaagggcgccgtccacacaacggtcaagcaggtccagtgggcctcatttggaggcgccgccgacgatggggctgatccgttcagtgatctgtctggaggcgccgctgatgacggatttctcgggaccatggccgggaaccagagcttccagacctccgtcattgggagcgtgggggcatcagctcacgggatctttggcgggagccagagcttgactgccgaggtgacagatcaggattttttcggtggtacctccgatcagaacaccgatacccagcagcagcagctggagcagagcggaagcagtgctttcgactccacagatcccaagtatttggagagcatttatcctgggtggaaatacgacgaggcgacacagcagtggtaccaagttgacaattctgatacgcacggtaacgccacccaggtggacaccagcactgagaatatccagcagcagcagcttgccgcttcttacatgcataatccgacacagtcatcgctagagacaattgcggaggagggtacgacgacagggagtgtatcgacatggggacagggtggcacctcggagtacccaccaaacatggtattttacgccgagtacccaggctggtactttgataccaacacacagcagtggcaatcgcttgagtcgtaccagcaggcagtgacagctagtgctgttcaggatggagcaaacaatggtgtcgttgcctcttctgctgagacaaattatagcgtcaaacaaaccgaagatcttcctgcccacaatcaggtggcccaacataactctttctctaataactatagttatcagagccagtggcagacaaattcatttagtaactctatgcaacctgaaagtgcaacagctagtctgccagatagtttccagagccttggtcagcatgctatttctgaatctttcaattcctctacaaatagtcaagttagttttaacaccgctgaaaccgctacaagccattatggcaacgtgaacttagattcgtcaagtactcagggtggctacaccgcaagtggtggtcaacaaactggttacaagggcttcgaacctttcacaggtcatcaggctggttacaaggggtttgaaccttctacaggccaccagacaagtcataagttatttgatccatcagcaggtaaccaaaacagttacaagccatttgaaccttccactggtcaccaccagcacaaggggtttgagccttccacaaatcaccagggtgattacaaggcatttgagccatccacacataaccagggtggttacaagggattcagtccttccacagttcagcagcctggttacaagggatttgaagcttctacaggccttcaaactaatttcaagggatttgaaccttactcaggtcaacaggctggttacacgggatccctaccttctacaggccaccagtctagttacatggggtttgagacttcttcaaaccagggttatggtgatgccaacaatgttgcaaatagtcaaggctttgttccgatggagagcatgtacggaagccataatcaagctcatacaaacccccaagtgcctttgtcaaacagttatctcagtgttgataactccaagaatttctctcagcaacaatttcttggtccaaatgcttcacacttgcaatttgggcagtccccacatgaagagaggtcatcagctggacgtccaccacatgctttggttgcttttgggtttggaggcaagcttatacttatgaaagaaaccaactcaatggccacaaactatgactctgggaatcaggtatgctaagagttcctgtgtgatatatttttagtcatcaaacaaaattatggcatatgttaaagtaactaaaatattctattttaattttgcaattcaaggggaattctagtggcacagtatcagttcttaatttatcagaggtggtcacggacaaagctgatgctttaagcgccagtaacggtagcgcacttagttatttccatgctttatgtcgtcaacctgttcccggccctcttgttgggggaagcgctgcatcaaaggatgtgaacaaatggcttgatgacatgattgcactgtatgaatcatcgactagtgaattccagaggggtgatcctcgcaagttgcttatttctttgctgaagatactatgccaccactatgggaaactgcgttcaccttttgcttctgacccatcacatgaggtactttctgcctttcatgctcttttttgttgcatctatagtgtattttaccaaaacagaggctgatataatgaatgctccagttaatcaactcttagtgttgtaataacggcgcagagggcaagcttttaatactttttaatgtgatgaacatgtctgaattagcagtttaccttttagctcatcgtgtgtgataatttgggtacttgtttcattgtttgtcctttcacctttgtatctctgactcatttgaattctcaataataggacacagacggtccagaaatggcagtaactaagctcttttcatcttgtaagagaagtagctttcaaatgggcgatttcggatcccatgtccgttgcatgaagaatattccctctgaaaatcagatgcaggtgattgccatttatattatatggatgtgaaatttagctaaatcctaaatgtccccagttgaggcagctactttgcttgtaggctgttgcacaagaggtccaaaatcttctagtttctgggagaagaaaagaggcccttcagtgtgcccaagaaggtcaactgtgggggcctgcaattatacttgctttgcaacttggtgataaggtttgttcgacttaatagccttctcttgtttgcatttgaatagtttgcttgattttcaatgaggttttcttttccttaattttttttatttatcttttctttccccaccggtggtgcagttttacgtcgatactgtgaagaaaatggcccactgccattttctatctgggtcacctttgcgaacattgtgccttctcattgctggacaacctgcagatgtttttaatgcagacaacaacatcagtagcaattatggttctcaacagcctatggaggtaatacataattatttttcactttctagatgcgcgatactttggtcgtaggattattctgtagttagatgtaatagtaataattgttcttaacttttcatagcacttgcctgtcccatattgttgtacaataatggcttttcatttctttgttactgcagtgtcatggtgctttggttttttttttcttgaagaaaatgttttgcttcattgataatgcattctactgttctaccacctcgttgttggctttctgtttaaatagtggctcactttataattcattgttttgtcacacagcctagtcctaatggcatgttggatgactgggaggagaatttggctatcataactgcaaataggacaaaaggtgacgacctagttattacccatcttggagattgcctttggaaagagaaaaatgaggtctgtatgatatgtatttgcagaattaaaccctttcttttttgtggtcaagtaccttatatgccttttgatacaggttgcagctgctcattcgtgctatttagttgctgagttaaatattgacccttactctgaaagtgcaaggttatgtctccttggtgcagaccaccttaagtgccctcgaacttttgccagccctgaagccattcaggtatattactgctagccattaacccattacctgtaaatatattgaatcttagtgcaattttccctcgaagctctatcttttgctttttaatgattagttaatgcaagcatactgtctcagtgttttataagcaattattgcatagatacatagactggaaatgcaagattgtgtgtaaccgctaacctgttgcttcatctttttttactctgctgtccactgttctgaactaatattttgaaatgcgataacagaggacagagatttatgaatatgcgaaggtgcttggtaattctcaatatatcctgctaccctttcagccatataagctgatatatgcatacatgcttgcggaagtgggaagggttgctgattctttgaggtatgttgttgatttgtgcatggccagcaaatgatttcaatgctatacctaaactcctgctttcacattatgacccatttgaatctccttaaaggtactgtcaagcatctatgaaggtgctgaaagcctctggccgtgccccagaattggaagcatggaagcaattattttccaccctggaggacaggatacgcactcaccagcaggtaaatccttacagcttgttttgcaatgtagctgagttcctccctctccctattaatgcacttgtgttgattgctattgtttagggtggatatggcacaaaccttgcccctgcaaaattagttggaaagattttcacctcactcgataaatctatatcgcgcatgatgggtacaccttctgctccacttccgccattgccacagggtgctgttagtgatagggagagttacactgcacctggggctacaaagtttgcaaatagccaatcagtaatgaccatgtcatcgttaatgccatctgcatcagtgcagtctatgagtgagatgtcagatagtggcaggaagattgcacacaacagaagtgtttctgaaccggacttcggcagaaccccgaaacaggtaattatgccctcggctgaggtagacacttataaagacagcaggttctgattagtgaatgccgagtgataaaattctaattcttccgtttgtttgaaaaataacagggtgctggatcggacagcacacagagtactgctccaggatctggtagttcacgctttggttggttaggctccacactacagaagacaatgggatttgtttcaaaatcccaccggcaggtactttaactgagctattgaattggagccactccacttttgttcagtttctcttccatatagtaaagctaatactgagatccttcctatgtcttgaaggctaaattagggcaacaaaacaagttttactatgacgaaaagctaaagcgatgggtggaggaaggtgctgagattcctgccgaggagcctcctctccctccacctccatcaaaaccctcattccagaatggtgtggtagactataaattaaatggccccatgagtgcaagtcatactcccaatggattcatggaagggaaatcttcaacttcttcagagcatggttcgggaatgccaccaattccgccaagccagaaccagttttctgcccgtggacggatgggtgtccggtccaggtaatctaataattctgccacttgctcatgtctttctctatattctataaaatattgaccagaggaaagttatgtttatttttagatatgtggacacattcaacaagggtggaggaggaggagcagtcccatcctataacaagccagctgttgcatctgtgacaccacccagtggtgccaaattctttgtgcccactgcggctgttgttgctgcagagcagatgcctaaccaaacagcggaaacacatggtgaaaccttccgtccagatgagcgttcatccccagctgaaacgtcattttcttcacccccaccagcaacacaattttcagcaccactgatggtgcctaccattcagcggtatccgagcatggataacatcactaccccgaacaatggatccggattatcatcgggaagtaacagcagctcattctcaagatcacgagcagcatcgtggagtggaacttactctgaacaaattaatgctgtggcaggtgctagatctcctgaccagcagaccatgccatcgcccctcatgcctgggaagcagtcacatagtcgttccaacagcaactcatctgttcagttcaacagtttgacagaggatcttcatgaggttgagctctgatatgctgcgactgctcagtatgacccatgattttatagaaacaacctgggtaaaataccttgatcctctcagcaaaccccctagaggagggagggagggagggagggaaaaagagaggaaatgttttacagtaaatgaagggaatgccacaagtgaaatggatatctcctgtcttgcacaaagttgtgggatggggaagtaaagcaaggtgtgcccgccctgtactcgtacaaacagttgtttttttgggagattttgtaggtattgttggttattatgggtttagagaaggggataaagagtcggatgtccttttttacatgtgagaagcagagagcatgtggacaccattgtacagataatccaccccagcccagccccagccctgcccccatattataattcattgaagacgcagagaattgggaattcatccgccccacatccttttttgtcattgtattattatcattttttttcttcataattttggagaaggatagaagagagggagaggtcaagatgtgtctggatattctagtgtaagaaagaagaaagcttttgactgcgtagagtgttgttatacttactgtaatgttcctataccatgatgatgataatattattctttggagtcgaccgatggatcaatcaatactggagtaagtagcatcctttttgttttgtttcccagcatgcgtgatgaaagaggtcaatatcatgtggtggtttggtttgatgtgattcatctggtagtttaatttgtgctgtgtgttggtaaccaaaggctctctctaaaaccggagaggaagaatagatcactatttccttcattccaaagaaaatctataacagaaattgagggcaaagaatctggataattgttttaagtttttttaattggttattctaagatacttcctccgtcccaatatattgcaacctaggatagaatatgatgcccaggttcatataggttcatagtattaggatgggtcaatcccatcttagttgcaatatattctaggttgagtttttaggatgtagggagtaggctactagagtagagagattggtaggaatcaccaaaagttgagggcatttttttatttattttcactaaaatatttaaaaaataatcttttgtttcaaaaatttatagatctggatgcctcatgccatttgggagtgtaaacgggctttaaaaaaacatcaaacattctgttagagaatgatgtggcatataactgttggttactcctttcccgccctcccagagggtttttttttataggaggaggacgcttgtaaatctgcttgataagatagaaaaatctaggccacccttataccagtattttgggggttttttttataggaggaggacacttgtaaatctgcttgataagatagaaaaatctagaccacccttataccagtattttgcgggtagcctttcctcagtaaaaataataatatattttcaaagggcaaaagggctccgtctgacatgaacaccctcttttttaggctgctattagacggagccaacagtcatctgccagataaaaaaaaaagtcctctcaaagtgcatgaggcgtctagatctgtaaatttacaaaacgaatttttaaaatattaaatgaaagaaattaaaaattagaaaaaaaatggtgaggtgaggaggtaggcaagtcaagtcgaaaaacatgatgatgacgactgctaattcggcccaacaagtagtcccctcccctccctcgacgagagaagacaagacaagtcgcgacctgacgacccgaccttcctcttctctcccgctgccctccgccgccgacccgcaggggatcgtggggacgatcgatcgaggaggagagacccaaaccctagccacccaggcgccactcccattgcccccttcgccagccagccatgtctgcggcgcacctcctccgccactcccgcaaggttccttcctctccctctcccctctcctccatctcttgtttaattctccgcagcattctctcatcccaacaccgaacgcatcttgttccgatctgtcgtgcttatgccattccaggtcgatcggaacatcaccagattcccttcagattcccaatctaatattcctactgcagatggctcacattccaatctacggctctcacttttgtactgcagctgcggactctacgtgatgctctagattatgatcggtctgctcttgtacgctacttctccgctgcttctgcatcctttcccacaaagggaggtgctgctgctggtatgtgctgtactagtagcctttttctctttttctcaattgatttactggagtatatgcatgcaatctgtttgtttgtttgtttgtttgttcaaccaatctggagatgccctttcacattactaattttctgtgctcattatttatttctcttgtttaattgtatcttctgtttgtaatctatgtaattctgctgcggctgtggtcactgcttataagtcctgcattgtcatcatcgttcaaactgatgtggtgctttgcactctcacttcaatttaatcagaatacaacttttgtatcttgtatcagttatcctggatcctccagaggtgcttcttcttttgcacctacatattatcagtttcacaagaatatggggcattcatcaattatgtattctggactgtaatctaattaatataggcaaattatcaattgtttacactaaaatctgtacaaacaaactattttaacacaagcacaatgctttctcatcttttttacctctccactccgttattttccgtaccttcgaccaaacatgttttggcttcctgagccaatatcatcatttttatttattaaggtgtcatttgccgttgacttagtttaactacgctcatatcctccagtgcagacagcagctatttttgtcacgtggcagcttatttttacagagagaagtttctgttgttcattgtcacccgtgcttttggtttctgcaggtgttgagaaaagaattggtggcgccagattccctcagtgcaagcagcctgggaaagagcttgagaccttcaaggttatgttcatgaaaaataatccgcattctgagatccctattgtcatatcctgattgtctagtttgtcattttatcttttcaggtgtcactaggaggactaaatggaagatatgcttgtagaagagcacctaacaattgtatcccaaccactattaccggtctcaacggttcattgtcatggtatgttttgttttctgctatgctattgttagcttatatggctgtgtaggaatatattgaattagagaaccacccttgaaacaagagaatatgaactagtaatacttgaacattgagctaagacaaaccataaaaaaattattgacatcttctgtaaggcccctgagatatgcctctctgctctttagtgctcttttaccagaagaaatgaccccatgacagttctaatttccattgcatcttggtaatattcctcttttcctgtttcttttcccagtggacaggtgtcttcagcaagatctttctcaagcagtgcaggtacttatcccagcagttagttagtcttaagtgggtttattggttgggcctcacttatgtgtgatgctttttgggaagtgttcttggtgggaggggttccttgaccctttctttataaatatttctctcttcttaatgaaatgaagcgcagttctcctgcgttttttgggggaaaaaaacaggatatcgcatagcagctcctcagttttttattgatcttttttgcacttatctacaatgttgtttttttgccatccttctttttgttctattatttgcttcactttatcccgtcttcccatgtaccaattgtttcatgcatgtgatcctctattctgctacttttttttggatatttttctccacatctgtatctccgttgaattttcaaaactttttttttgtatgtgttatataagcatttaggttatttgctacaaaataagtatatcccaatctcacaccacatctccccattgttttggttactatgttaaaattttctatgtaactccaatcaatggttccttacagagcatgtaaagtaaggtcctctgttagctctcttaattcttgacgcaatttgcttattccagacctgccaccacatcaggaaattgggatgccatcactctctcctacaatgactgaggtatctgttacgcaaaaaaaaaaaaaaaaaaaaaaaaaaaaaaccgttgctccttatctgtatttcttgaattgcatccatcggtgttacacctttaacaccagaagtattacaccttacacttgtattgtctgtaggggaacattgcaaggtggctgaagaaggaaggagataaggtctcacctggtgaagttctctgtgaggtggagacggtaagttttctaatatgtaaggctacatgccatatattgtttagatttatttttagttatgcagttagccagttacttctattaagctgcagtagaagctaaatatcctttgaatgcattcctgctgactaggataaagccactgtagagatggagtgcatggaagagggctatctcgctaagatcattcatggagatggtgccaaagagatcaaagttggtgaggtaaaaatttactgatcaaagaacaaccaatttatgactctcattttactaatatgattattacagttgcctctgcctataaatttttctgacgtaatcttggttgatttatggccccactgttccttttagatcattgctgtaactgtggaagaagagggtgaccttgagaagtttaaggattataaaccttcaacttcagctgcacctgcagccccttctgaaccgaaggctcagcctgagcctgcagagccaaaggtgaaggagacagagccttccaggactcctgagccgaaagccccaaagactgaagaagcttctcaaccagggggtcgaatattctccagccctcttgcaagaaaattggcagaagataacaatgtagtttttttttcgtgttacctatctaggctattaattggtagattttattgaatcatacttaataaacacaaaacaggttccactgtcaagcgtaatgggaactggtcctgatgggcgaattttgaaggcggacattgaagattacttgggtatgccctttctcttgtcccctccaccccccttctctctctctttctcctcccttaatgatgaaatctgcgtggaaaaatgcaattaactagttttatatatttaccaatgactatagattaatttattttcaactatatcacttcctagtttttttagagaaaccgctggggaagccctcattttgtagctagtcatgtgtgctcctggacatctcatgctaattctgaatggtggactcataatgtcgaattttattggggtgtcctccccttgccagctgtcttcttgttcaatctttaaggctcaatcacaagaaaacaagctgtatcactcaatatctttgtggttggctatcatatccattctaagataaccatattcagatactatttgatcacttaattcaatatccactggaccagtatatcaagttttcagaagaaaaaagaggctatttatctgactcagttttgcacttatgcttatttgtgtacactgtgttagtagcagcactagtttgattcaaagtaatattaatgtaatttgcttgagcttgccaaggttcaagttaaatgtgtggctgtcactagcctgttatgtatgtcagatttgctgtgcttttattctgtatgagaattcaatcagcatctaactatcattttttattaacaaagcttctgtagcaaagggtggcaaaagggaagctcttgcggctccagggttaagttacactgatgttcctaatactcagataagaaaggtaaatttcaatgatacagaatcttgttaggttgattttagccgatgctattggtctgatagtgtattatcttctattcttcacaggttactgcaaaccgcctgctaagctctaaacaaactattcctcattattacttgacagttgacgcccgtgttgataatcttatcaagtatgttgaagcctagctttgtaatttaaagcaatcctatattacataggaaacctatgtaatgattcaattccatactgctggttttgtagctttttaaaatagttctttatttcaatctaatccaggttgcgaggggaactgaatccgttgcaagagtcatctggcggtaagaagatatctattaacgatcttgttataaaggtaattgccgttttcttgtttcttatgtctaccaaccattgagttgtcgcagattgggtgtatgatgtatatcagttcacagactgttaattttctcctgacctccagatctgaattgatcttaatttgatgtgcaggctgcagctctggctcttcgaaaggtccctcagtgtaatagctcgtggatgagtgattttatccgccagtaagttgtcatggagcatgtatcctgggattagaattatgttgacaagaaggtgattatggtaaatttatttctcgtgcagataccacaacgtgaacatcaatgttgctgtacagactgagcatgggttgtttgttccagtaattagggttagtaatctgaacttgtctatttatatgaaaaaaaaaaaacattggtttctagcttgtacctgtgtttcaggatgcagacaagaagggacttggtacaattgctgaggaggtgaagcaggtggctcaaagagcaagggataacagcttaaaacctgaagattatgaggtatatggatcgcatggtagctaatataagcatgagacaacatcatttttccttgaaaattctggtgcttttcagggaggcacattcaccatatcaaacctaggaggtcctttcggaatcaaacaattctgtgccatcataaatcctcctcagtcagcaatcttggccattggtactggtaagtcatgctaatatgtttgtgtaataataacggtagcatcctgtattatctgcatttctttctagtatcttttgagaagcatattatctttgttgccccatcctattatttttaagtcgggcttctactcagaaatttggcatgatgttacagagtgccaactgcttagtagcatttagccttttataaacagggcttaagcatagaattcaaggtgtagtagagtagtatcctttcgcttctgtattctacgtttctacattctagataaacttctgctaagaaggtccattcacgttgcagtgttcttgtgatgattacatagggtgtcattatttacttaatggccttttttttgtttggacagctgagaagagggtgatacctggcagcgtagacggccagtatgagtttggttccttcatgtcggcaacaatgagctgtgatcacagggttattgatggtatactcttaagccttatctgaatacatgatagttctacggaccataggctagaaaataactttgttcatgtgtgctttctctaggtgctatcggcgcagaatttctgaaagcattcaagggctatatcgagaatccaaactcaatgttactgtgaagttaaagatcagcaaaactattcttctcatgtgctcgaataacgcagagtggtgctatctcattttgtataataccggcacggtgttctgtcaaggaggacccgaaaaccaagagcacataaccatagacagaatgacctggtttttggattaaaagctttttctgtttatcttttttttttttgtttgtttgtttcgttccagttatagtgggaattaggaggatcaacttacaagcatttttagcacctttttgtgggtttaccctcggcaagtgtgataactggagagagtaaattcccgggaaacaatgcagtatagcctgtatacgatttgtcccttttctttttccccttcatagtgcaaaaccaagaggcgcagaaggatctttcggaataaattggcaatcttggggagtatggcttatactgtttcttaagcttttgtgtagagaagtagattattggtcataataaatcatgcatttgcttatttcacatacatgtttgatgtgctggtttaattttgggcctttaatggagtacaataaaacaaaaggaagcttgttaagaaagaatatgcctgtgtgttcttctcctccaagtcactgattttcttttttggctgcccatgggaagtttgatcgtgtattgtctgcttggtcggtgcattgttattttcttccacgtgagttggcacaagtgcgtctcatatttcttgacctactcctatgtgcgttgattggttgtcattctttgaagctgcaggaccgagaaggtaagacgaatcttgtccctcgcagtatgcatttcagcgttcttatggaagaagcttctaatcaaaaggaaatgaatcgctctagtaatcccaaatccaacacgcaattctgaacgtcaaatggaacggaatgctagaaagcgaagggagactagaaggtcaaaaacttggaaaaaggaggagatgaaaaatggaaccgatttcataaggagctgagcttttcatagctccgcttttgataatttcgatagcatagcataattatcctccaagaaacgccggaagcaagagcaaaaccagcaaacggccaccggttccaggacagggttgcttccgggaaagatgcatgatgcacagttttccatcaacatccgtaccaaattaagtgtttctttgacagcgtgccagatttggatcggtcattcgttgcggaaagtagtaccaatgacttactgctactattaatctactactgtttcgcttaagtataggtaaaggaaatgtaaccctatttcgagaaaatatattagtggtagataggatagctaggagatccaaagagcagaatggtatactgcattagatatatccaatgtgccacgatgagtggtttttctttatctgtttgtactaatttgcgcacttttgaccgataagcgggccggcatctttttaaatagagaaacacgcgatatgatgataggcagtgagatttcttcacaaatactgtacagaacagtagagcagtagtagtagggcacaaattgatggaatcaacttagcaacctttgtagaccgtcgtcaattttacaagggagagatatagtagaatgcgggtacaacagttcatgctgtgttgagttatatattgtttttgggtttgtgattaaacagtgtaacaacacggaaaggttcaagacgagcaaacacgtcagcatgtacaaacgcagtgtatgagttaattaattatatggttagcgtgtatcgacattctcgataccagtttaaaatatgtgatgatattattagaccttgcacccctataaattagggccggtgaacaaaaccatcaacgccttagtttttgattttgaagaagaaattgttgtcagcatcattagatcttgtgtgagtatatttgagagtcaaatcagcatgagcggtttggaaaaccgccgtctgtagtgtagcggttttgtctccagagcgacctcttctctataaagaggaggagaacttccatggaatgagccacaaaaccaccatcgatcatttccatttccattttcaggagagatccacatcgccgttggcctttcatccagtgagtgagggagggagatctcgatctcggtctcgcgacatgaagaaggcttcgtctctgtcggagctggggttcgacgcggagggcgcgtcgtcggggttcttccgtccggtggcggacggcgggtcgacgccgacgtcgcaccggcgtcggctgacgaagatatcggtgatcggcgcgggcaacgtggggatggcgatcgcgcagaccatcctgacccgggacatggcggacgagatcgcgctggtggacgcggtgccggacaagctgcgcggggagatgctggacctgcagcacgcggcggcgttcctcccccgcgtccgcctcgtctccgacaccgacctggccgtcacgcgcggctccgacctggccatcgtcacggccggcgcgcgccagatccccggggagagccgcctgaacctgctgcagcggaacgtggcgctgttccggaagatcgtgccggcgctggcggagcactcgccggaggcgctgctgctgatcgtctccaaccccgtcgacgtgctgacgtacgtggcgtggaagctgtcggggttcccggcgagccgcgtcatcggctccggcaccaacctcgactcctccaggttccgcttcctcctcgccgagcacctccaggtcaacgcccaggatgtccaggtcaacaccttacccctctctctctctcctccactgccattgccattgcccattgtccattggccattgttgctgtctctctctctctctctgcgacaaagtgacatgtggtgtggggcctagctaaagcatatggttggctgagtggtggtgtcactgcccacccacatgtgatgacatggcagcctttagcctttatcctatttccatggatgactagcttcctgcacacatgtgacaagagcgaacacatgcttctgacaacttgataaaagcccaaagatgcttagttagtgctgatatgatattattaagattcaactgaatagaatcgaatgccttgggttgatgctcctagctactactatatgtggaataatacaacttaggatccgcatacgggagaacgttttggctaaaatttccaacaagacaaagttattatcatttgactaatcgaatattagtaactacaaattttaaaattagttttttatatataaaatcaaattgcgcgcctagcatcattatattttctatcatataatagcatatatgttttctcactatattattcaaatatattaaaatgacaacataattttaaattttgcaatatgtgtaatattcatattatattttatatacatgttagttattaattatttttaatatcaaattttagttatttataaattgtatatattcctatatggactctagactcgtcttttaatatttcctttttttaattccgaattttctgtaaattgtatttctatatagactctatgctcttcttccaatattatttatttttatttctgaattttcatattatattttatatacttgttagttattaatatcaaattttagttatttgtaaattatatatattcctatatggactctagactcgtcttttaatatttcttttttaaattccgaactttttgtaaattgtatttctatatagactatgctttttttttcaatattatttatttttatttctgaatttttattatttctaattgtatttctatgtggactctaaactcatctttcaatattcttcaatttttaatttcgaatttcagttactaataaattgtattcttatattgaccttaaactcttcttcccatatttttcttaatttcgaattttagttatttgtaaattgtattttttatacagactctagactctacttttaattttattatgtttattccaaattttagttagttttaaattcctatatggactctatactctacttctagtatttcttttttaaattccgaatttctattttttttcttaattgtatttctatatggactctatcctctacttctaatattccttatttttaatttcaaatttctattatttcataattgtatttctatatggactctatactctacttctaatatttcttgtttttaattccgaatttcagttatttcctaattgtatttctatatggactctatactctacttctaatattccttatttttaattccgaatttcagttattttctaattgtatttctatatggactctagtctcttcttctaatattccttattttttaattccgaatttcagttatttcctaattgtatttctatatggactctagtctcctcttctaatattccttattttttaattccgaatttcagctatttctaaattgtatttctatatggactctgctttttctttttctccgattaatgtgagaatttctaagccatgagagcgaatgtggaagctcctttttctattcctttaattatataatagataatttgtatataggaaacttttgcatcaaatacaccatttactagctaaaaatgagttggtccctctttaagaaacgaaacgcagctccagcattaaacaaatggagagaataaatcttagaatgactatcagaaagaacagtctaatctattatgatgtaatacggcatttttattattgaaccaaccagagagaaagatgtgaaggtgcatcagtagtgattaacactgaatagttacggggggaaaaagtccattttaaattgggcctaacatttcatcgctccacgattaattaaatagtggtgatattagggttctattgaacaattaatcatagtgctaattactattgactagacattattagtgacatgttagttgaggaaattgacaaaataatgaatgaaaaataaaaaaatgcaggcgtacatggtgggagagcacggggacagctcggtggcgatatggtcgagcatgagcgtggccgggatgccggtgctcaagtcgctgcgggagagccaccagagcttcgacgaggaggccctggagggaatccggcgagcggtggtggacagcgcgtacgaggtgatcagcctcaagggctacacctcctgggccatcggctactccgtcgccagcctcgccgcctccctcctccgcgaccagcaccgcatccaccccgtctccgtcctcgcctccggcttccacggcatcccccaagaccacgaggtcttcctcagcctccccgcccgcctcggccgcgccggcgtcctcggcgtcgccgagatggagctcaccgaggaggaggcccgccgcctccgccgctccgccaagacgctctgggagaactgccagctgctcgacctctaataaatcttattattatcatcgtcgtcgtcgtctcgtcacggaattaattaaagtacctactccgtacttagctagctacaataataaggattcattgatcactacaagagtgatcgactcgactgtagtatgtgtgtgcaatataatgtgctgtctatcaacaactactagtattgtcatttttttcgaaccagggaactttttaatgataagaagaaaaagacaagtacttattgtcgagcactcgtggacaacactgtgattgattgccttgatcaatcttaccaatttttggtagctgtaaataatttacatagtttgttggggcggatgagcaagcaagcaagctgaatgggctgttgatccggacgaacgagccgcgcattccttgcttaattaatgggctgtcagtgggcgaacgaacttggtggggcggacgtcaatcttttggcccaaaatttcatgacaagtgcagtgcggtggaaggaaaggagttgggccaggccggtaggattatttatgatgggctgggccggaaaaggcagcgatgatatagagcgggctgggcctcccaatggctagcaactcttcataggagaagaatcgtgcaacaatacacgcccaagagaagaaaccgcggcatggaaggaacaaatcgtggtgcgctctctgcgtctgcgtgtgcgcatggcatcgtgcagtccacaggacaggagacggcggatcgcaagacatccgcgccgcatcgggattccatcctttccctcatgtatactatctccgttccaaaataagtgtagccataaatatccgtgtttagcagtttaaccatccgtcttatttaaaaaatattaaaaaaattagtcatacataaagtactatttatattttatcatctaataacaacaaaaatactaatcataaacttttttcaaataagacgaacggtgaaacgttaaacatgaataaagctaaaacagtacttattttagaacggagggatcagtactctgcgtgagtgctcgtggcgtgctggttggaaacgaccattgactgattacgtgctacacgtggcagacagacatgtgggccctccccactcccttccatgcttcagcttcacacgatcgatcgatcgatggagatgcggcgatagttgcgctcctcctcattcacagtccacactgccatcagccatggggggcagccaccacctcttccgcttcctcgccgccgacgaccaccctttcttccccaccttcccaacctcctcctcctccttcctcctcgacgacacccacccatttttcttccctccctcctcctcatgcccactcggtttcacctctcctccttcatcgtcttgcccactcggcttcacctcctcctacgacctcgacgccgccttccaccaccatctcgacctcgacctcgaccttgacctcttcctcccaaccccgaccccacctgtaaccacctcctgccccgccctccgcgatcccttccttctccaccactccctcgcccaccgcgtctccgcgcttgagctcgccgccccacgcagcaagtacacctacgaggccgaatccgccggcaggaagatcaagtggaccacccacgacaagcccgacggcgaccggaccttcaagtgggaggcccagatcgacacccccaacgacgatggcttcgaccgcaagtggaagtgggagtccaaggcctccgccgccggcaccaccaagctcaagtgggccaaggaggtcaagggcaagggcttcctccacccatggtcgcacgcctactccgtcgaggaggtcttcggggacgacgaccaccaccacaaggcagacaagacagcagaaaacaaggtcaagcagcacaacaaggatacttctgccaaggaggagaagaagaagacgaacaagtctaatgttcagatcgttgagatcgacgacaacactgccggatgcgtcgccatcaacaaggtcacatcttctcctctacatttatttcattatttatttattcaattggacttggtcctagatttttcctattcagagtttcagatctaggagtagcagcttgttatctcaagcttgcgacgtgaggtttgcgcaccgatttgcacaaatccgtcatgtttctgatatgcaaagatctaatatacggagtacttaactactactccctccgtcgttttgactttaagattatggacaaacataataatatttacagtactaagttagttccatcaaaccaataattaaatatattttcataataattttgttttgggttaaaaatgttactacctttttctataaacttgatcaaatttaaatagtttgacttttaccaaagtcaaaacaacttataaactgaaacggaggtgtatttccgatggcattttgtaagggaagccatacccataaatgtgattagcaattgctagtaacagatagtagatcgtcaattttcgtgtgcgctgtactgacaacacaacactggttttctcaaggcgtttgcaagcagctacgccaagggcaagagaaagcagctgtccccgcaggatgctgcattgttgatccagatgaactaccgggctcacctagcccaccgctcgcaagtgctgcgctgcctccgtcatctggcggtggccaaggccaagctcaaggacattaggtccttgttctacaacatctcttaccgccgccgcatttcgcatgactctgaagagcgtcagaggtttgccgacaaaatcattgccctgctcgccactgttgatgcccttgaggtattaagctcatcaccctttctgatcatgccgtttttcattaacaagtggcccccatcaaaattttgcattccagacaatttcttcttgttatatagttatttttatttattactatgggtgacgattggtaaccatgccaatgcatgtgttgttatttacgcgtttatcagcaatgttgtttactaccaaacgttatttgattgatgaaatcatcagtgtagacatgacagtaaaccacacccaattttcttccgatagtctagtttagggtcctgactgaatttatggatatcaatacctgcaacaacatggctctcatacagtacttccatgtaagataatctaggtgtaagtgaagaaggatgaaaacaccagaaaaatattttctagctttcttcttcccccaattcttcatcagaataaactctaaacaataacacatttgttgatagctacgtgagggtagtttcttaaaaagaaaagaaaaagcatctaacagccataaaaaaacaaagaatactgtacatatatattgttttatcatgggctctataaattggaagattaagtgccatgaaatgctttgatcttttgccatgtgtgaatgttttgtgcttacagggaccagactatatggttcgcaatgcaaagaggtctatgctggaggagctggaggggatgctagagatcgtaggtcctcagtcactagggaagccaaggactctgagccgcagaaagtttgagaaccatatctaatgatatgaggactggtgtcaagggcaagtgaaaggcaccatcggttctatttcgtagtgcggcgtatgaagatgcttgatgggggacctacctttctgaatgtgtttacggtttagacagaatgttgtgtctgtaactctagttgtatgatctatcttctgcttgaactagtacttatgtgttgctagactagttagagcttctttataacctcttgttgtttgaggaagcttcttgtagaaactgtttcataatttgtcatgaaatgatgtgcggcatgtgccccctaataaataagaccattaccatatggtatgcatattggcatggtgcttttcaaccgatgcatctaaccgtgcggcgtgttgccaagcctccgcgttaccggccacatccaatacggataactgcaaaaaaaaaaaaatgctaaccgattgggagaggcaatgatggaattttttggtattccgggtcgttgttgtgttcaatatgtgaagcatcccgttcctctcaggcaaagaaagttccaattcaactggcaagcactgcaggtgactgctgaaacccccatatgttggtgtgtgccgtgctcatggttatcttgtgccgctttaagtttctgtagaaggtttgcgtgatgtcattgcatgcactgggggctgtacttatactgatctaattgtaagtttgtatattataccatattcatcaggctatgttcaagtttgtaccacttagggtgtgtttgaggattggggagattggggagattggggagattgggaagatacgcaaaacgaggtgagccattagcacatgattaattgagtattaactattttaaacttcaaaaatggattaatatgattttttaaagcaactttcctatagaatttttttgcaaaaaacgcaccgtttagtagtttgggaagcgtgcgcgcggaaaacgaggtgttttctctctcaatctccctcaatgtcctccaaacgaacgctgccttaggttgtatttctcattgatcagtatattgacatcgaagtatgattctttgtattttggtaaccctgtgcacatgttaacgagcgcggcgtgcttatacttcttgtaatataaatgcttgactccgcccgccccaatcgatcccgagctcgagcaccttggtcacccatcccgttgtttccccactctgttccaagctggtccttccggagcttcgagtctctgccttggcttgggccaccactccataatttttttttagataatggaatgaaacattcctacctttgctcattagagctaaagccaaccacttcctccctacattccattttccacatttatttaactggccgattgcaccatccccatccacccccacgtctcttctacatctccctcccggacccaaccaccttccttcctattccttccacccccaagacccatggcctcctccccgccgtgacgtttaactatttattactcctagtctatgatatgtggatggatgatcttatggttaacatatactatcatctatttaaatgcatattacaactaagataagttaagacatcttccgccttcccgcagcagaggagcatcatccaaaggcaagggaatgacagcgcgtgcaaggctccacaagagtcagggttgttataggtgaaactttatcctcgatgtaccttcgtacagcaatggcagctcttgcggattccttgagcacagcgttgctaacaggccagcaaatcttcccattactttccccacaacacctatcatcaccacctctaagtgtgtccaacacaagacgctcaagtgagactgcggccttgacgatgccacatgttagctcaaccaagctctttgcggagttgaaccctaagatcttcacgctcttgaggcagtcatggctgagctcgggcagctgcctcaaatgtggggaagaactttcaataatcgattcatgtgccatatcgtcctgacaaacctggaggtgataaaaaggaagattatatatgaatgaatcaatggtccatccgacagatatctttctttgcaggatggaataatggatgaacagcacagccttacatccaagtataaagtctccaaggaaggagatgcatcgacgaaagaaaccagaaagaaataatcataggatggggaaaaggtccctcccgcaatctgaattgttaggtgcttgaggtagaggaatttggtaggcaacattggtatattaaccgcctgcacaacaaatgcattgtcacatgcagaatatttctactgtcatatgcatatgtatagctactatatatgcagggtcttagaacatacctcagagtccgaacctaattccatagtctcaaggagggcgataggcaactagttttgtaaatttttcaaatagaaaattatttcttgttaacaaccaaatttggtaacatctgtgtcaggaaagaagattggatcaaagcgaagtcggaggcgaagatcgagttcggaaacagagtaggaatcggctggagtccagatcggctatgattaggatcggctgggtctgagtcgggctaggtaagccgatacagccgattccgacaatacgacttgtgtacgacatcgggttcaagttaatgtgcttcaagatgattgccacgcatggatagagtcctgggaaggcaattgtatctattaattaagatattttatgtagattccttatagataaatgtgggcaaaagtctgccgcaaagacttatggtatcttagagtttgtaagagataatagtcatgtccggtatgggcatatcttgtaattctcgggtataaatagaccctgagccctatgtaattgataacacacacgttcaatacaatttcggcgcatcgccaccctttttgctttagttttgtttcgacgagttcttgcttttgggttgagctgcatcggtttcgatcttcaacaagaggtaaaacttgttatgatgacttgtattctcgggattagtgcttccatctttatgatactctaatcttatttatataattcgtcgagttatcatatatcttacataatctctagcaatatcgccatctaacctactatcggttaacatctgttagcagagggcaaccgattaggttagattttgacgttgatctagattatataagatatctaccactctatgaaacttctagcggcttgattgtctagatatcgttcttcatttcatacttaatgttgtatcagttaagtttgatctgttaagtcgtgcttagaatatcgatctctagcctgccttctagttgccgattagaatagcatcggagtttcagccgatcttatccgatttaactatatttgttatatatgctttattgacatgttaaatctgctctttatatcaagatattgttgtatctaagtatgttaggcctttgtttgatatattatacatgctttaatatcctgatatagagtagtatcagagtattagccgatacatgttagatctatttgatcggctacgctataaacatatatagtcctgttattgatatatatttcaatctaagtgatttatactgtctcggcatggtgactgatctatcccaatcatttgatttaagtatatatcgatataaggagtatatatcgttaatatctacagccgatcgagtagatttagttcttctttacttattcatgtctgccgatcgatacacagatgacatcggctcaaaggtaaatgatatgtcatcggcatctagccgatcggctatcatttatagatttaaccacggtttctttgcttctatttcttgttgattacaggatcaaatcaactggcacgctaacacacctgaaggtgagctttggacctgcactggagttaagcagatctcccgggccacgtgttttctgtcaacacttttgtaaatatttcaataaataaaattaaaaattaaaaaaaaaatcacaactagtgcaccaactgcatgtggacaggagggagtatgtagtatacatgtagattgtgaatggcggttggaccgcccggctcaccggtcggacaagtggaccgctgaaacgagagttcgtccgggtcatccatcggtccggctttttttactaaggtttaaagggcgaaaatccgattcgttgtaaaattaagggatctcagatgaacttataccatttcttgaaatccggggcgggctggcgtggattctacccggcctgctcccttacttcggccccatatactaccagcccacgaggcccatgcatccactcttccagaaacttccggacttccagagtcttcgacacggatagcgcctcctcccagtcccatcgcacaacgaccgttggattgttgagccacggatcgcgcgttgatccgagcaatctgaactgttgctgcgccacggattcgttcgctgtctcaaattcattttcagatttcccgctccccggttcaaaatattcagcccaatttctagtataaatacccggcacaagtagggaatcaatcgcccccaattcgatcgagagagagagaaatggctctccagctgagcggtctcgccgaagtcgtgcgcgaggtcggcgtcgccccgggcccccgccgcgtcgtcatcatctccgacatccaggcaggcgacgctgctgtcatcgacgagttaatggcgatccagctcggtgtcgatgcgtcctgggaattcgtcaacagggagcggctcaggaggatggggcgcacctacaacctgctcaagatggtggaagcggttctcccaggcctcatcgacgacccctaccacgcctccgacttcctccgcgacatggagcataaaatcaggacccgcgctactttctccggtgtctccttccgcgtcctcgccgtcgagttctgcaacctcctgcgcgactacaacgaccgcatcatcgctgatcctcccgtctctacccgcgaggagctccaggaccacatcaacgagctcatcgcccaactcgatgaccttctgcaccagacctgcacgctgcgccaagatgacccggttccatgaaggcaagcggaaagttcatgtgaggaggtcccgatcgtacctagttgttcatctgatctgatggtagttacagtagcagtagtagtcaagtagtcgaatcagcatgttaatcctgtttgaaggagcaagtagcagcgagtaatgtcactagtagtacagcacagcacagcaacacaagtatatgaggatgtacccgcacaaccacagtatagacaagtgtgaaatatatggaaccaccataagttggtttgaatttgttctcaatcgtgttgcctgcttggtttcagttcgttggtggcaagtcatctctcttctgaatcttcttgtgaagttgttttctgaatcttgctgtgaaattgttttttctgaatcctggtggtggcaaatcgtccgtcttctgaatcttcttttcccctagcttctgttctgtccggtttgtgtacacagatctggttcgcgtcttttcacccaaatttttagatgtttctgtctgtgtatagaatcgtccggtcgattgtgtttcagtttcttgcaggattagtctgctggccaccgtgctctctgctagcttgtggtagtaaatcctttctcctaccttgatggttttttttctcgcacacatcgattctgatttcctccggttttttgctcgttcctccgatgtaggcgtcccccgccctcttcctggcaggggctttggagcggtagagatgcagttccaagtccttccccggcaacccgatctgccatgtgccacaacacctagtaagtggaatatgttttgattgccttgtgccagattataatgagaatgagaaaggtgacaattacttctgctgtttgcctccctcctgattcacagtttcatactagtatttagcaagtttttctctgtgttttacttaatgagattgctgtttgggttgtggactttagtattgtttctgctagttaatacatatcctgcagtcttcagtctaaccacctacttcatttgcttgcttgtctggaagggaaacacttggttgcattactgtgtagattatgtcagatggttctctagctgcagttactatagtaaaattgatcatcctctgaatcattgcaggtgggaggtggcatgaatatcaaatctgattgtgacgaaccatccccgtatgctgctattcttgcttctcaatactatgttgtactgttgtttcaagatttgtatgcaggcattgttcttgcgtaggacaaacggacatatcttgggttacctatttttggaattctgttgagtttgaactaacatattgccttgctgtacgttgagaacaatttgttttgctcatatacaagtttcaccactagtatgtcttgattgccgtatgttttgattataatgaggatgaaaaggtgacaattacttctgctgtttgaagagagctctaaacacatgatagatgtgccttttgattcacggtttcatgtttagcacgctctcgatcgatgatgtaggaaggtttatttgtgtttacttgatgaggagcaggaacatttcttacattttgctggttgggatgtggattggtaacgtgttcagttttcctactgggcagttgcatgggatgttttggcatgaaattgattttgacacaacttgtaattgttgtgtactctctccgtcccaaaaaaaacccaatcctgggtttgaactccaggttcaaacctaggattgggttccaggttcaaacctaggattgggttttttttgggacggagggagtagtagctatagtcagtttttcctcacttaatagctatagtaaaatactcaagaggaagtccagggagcccaaggtggggaatgatactcttcgacccactgaccgtgaaggagagtactatactacgtgcatgtttggagttgctcatatcttcgcatccttcaaatgacacattcattttaactactgttttggccagctactagtactaattcctgcagtctccagtctaaccacctattcactgacttgtcaggatggcattactgtgtacttctagattattttggttggttctctagctgaaattgatcatcctctgaattattgcaggtgggaggtggcatgaagatcaaagctgattgtgatgagtcatccccatatgcagctatgcttgtttctcaagatgttgcactgtgttgcaaggtttgtatgcagacattgttcttgcgtggagtataggacaaatggacagatcttgggtgactgttttctggaattctgtctcattatgctctgtgcggctggaggcaacaagacaaacacacctggacctgatgctcaatctgctctcagggctcttgctcttgctcggtctgggatgaatattggtcgcattggtaagctcagagtttcaaatactagttgatgctgacacaatcgaaggatacggaaatgttgttgatgctgtgcacaatacttgcagaaagggaggtagtagtagggaggaggctgtgtcgtaggccatttatcgccatggacatggagagtatctcctctttggatagtcgctccaaagcttcccgaagagagagtttcgctcattgtcctgaatttctgactgtcacttaatttggccactctgttttggttaaggaaatatcaagttttcatgcttaacaagacccaatctagtataccttggtggttccatataatatggttggattgttttatgagtttgtgccatctactgtatgagtttgtgtcagtttatcttttgtgagcataatataagtgtgatcttgttggctgcatgatttctggggtacagcttagaagttactcctatttactgtacttagatggatggttggttgtgctgttgaatcacttgtggagtagtagtacttaaattttaacatgttgcatttgcatggagttttgtcagggttcagttgcatttgaagagaatgtacgggtgatcatgttgcatttgtcagggtccagatcacaacttttgctggtgtgctgtcctgatctggtttcatgtgatttgttgaatgatgatggacctgtgtgttgaatacgtagtaggagtaagtactactccttgctgcaattttacaccattgtcgaatttatgatgatgcttgactgaaatttcagacgtctcaaggagggataggcaggggcgcagggccttttaccattgaggttacttgggccatggcaactagtaccactatgggcagtgtggctacaacatgtatcttcagattttttgtgttggccttatcatagcatgctgctctgctctgctctgacgttaaacaagggctacgagcaggcttccctgaaagaccagagaatttgagttcattggtatattcgacaagggaacaatttattggtatattcgaccaacaaattcatttattcatattgttctatcagtgtaaaagtcgaagaatattgttctactagtgtctgtcaaaagcctagccgagcttgagcttggatcaagaagctaagctcattgctactccatccgttctaaaatgtaagagattttagttgaataagacacattctaacgtccatcctaaaatgtaagagattttagttgaatgagacacattctaagttcctgtgtagaatcataatattaggatatatatcatccaatcaaaatcataatattatgatatatctcatacaatcaaaagcctttctattttaggacggaggaagtagctctcaaatgtatatatgaagatgcgtcttggccctatataaattttatgcacataaaactaagcaagaaaacattgcactgcaaccatgacatacggagtatatagtaaaagcagttcccacttgcgatttaagaacgcaccaacgacgacatgactcccaactgggagctggaaacttaaactgaaaactcagttttcaattcctcagcaaacgaacaggtccaaataatccaagaaacaaagcatggtttatctataatttgattaaagcgacaacattgtgcatttcagatagcttatcgcatagtcttaagaaaataataagggatagttaaagatgaaactacaaagatcttatgactaacatatactatcatttattgaaatacatatcacaactaagataagttatgacatcttccaccttccagcagcatagggatcatccaaaggcaagggaatgacagcgtgtgcaagtccccacaagagtcagagttgttgtaggtgcaactttatcctcgatgtaccttcgtacagcaatggcagctcttgcggattccttgagcacagcgttgctaacaggccagcaaatcttcccattactttccccagaacacctatcaccacctctaagtgtgtccaacacaagacgctcaagtgaggcagcggctttgacaatgcaacatgttagctcaaccaagctcttcgcggagttgaaccctatgatctccacactcttcaggcattcatggctgagctcgggcagctgcctcaaatgtgcggaagaatcttcaacaatcgattcatgcctcatatcttcctgaaaaacctggaggtgaacaattaaagaatatgaatcaatggcccagcagatatatatatgcaggatgttgaacagggtggcccttacatccaagtataaagtctccaaggaaggagacgcgtgaaggaaagaaaccagaaagaaataatcataggatggggaaaaggtccctcgcgcaatctgaatggtcaggtgcttgaggcagaggaatttggtaggcagcattggtatattgactgcctgcacaagaaatacattgtcacgtgcagattatttctactgtcatctatagctactatgcagcacataaaatcttagaacatacctcagagtctgaacttaataccatactctcaagatttggcataatggatggaagctgagcacgagcatagcacacgacattcggtcggatcatggacaagaccttcattgtcagtgtttctccaagtgagaacttgatccctccactaagggaaatactggacaaattcggagcttcacacacaatcacttgcatcctgcggcatgccataacactcaggcagctgagatgctgcagcacacacggtatcttcaggaaacttatcttgttgcatacattaagtctcaactgctccaaaacaagggagttcaaaagaagggactctaactcgtcacctgtaatatgcacaccacacagatgcagttttgttaggcttctcaaggggccaagttcagccatgggatggaaggcacagaaggtaagctgaagacatcgaattgagtctcgaacaccatcagataaaagtgagcatgcaaagatgtactttttatgtagcgtaagagtgagctcttcaatccctggtgtaacagcaacctcaagccatctatcaatgtaaggatatgtactgtcctcatcagctacattaagcttcaatatcttcgcagtgcccaagtggtttctcagaatgctgtcaattttgcacttgaaatttcccctagatgtcctcgggcaaagtgttttgaaattcaagctgaggttgggatgaaatctccaggaattcagaaaggaatgagaaaggcaagcagcacgagcagcagcactcatcggcattaaggaatgtatgtgacgccagatgtcctgcatccataagcatgggataaaatctcaaattaaggccaaatggaattacaacaagagaaaaaaaaagaacaggagaaccacatggagtatctctgccccaggttgctctctatatgattgcacaaggtgcaggatggtgcaattgattgtagtccatgatataagtttatgtgcatttgttcaaccaaaatgcacatcgatgattagtttattgtgcaatagcatattataaatagatcagtatagcaaagaaacataaatttgtaacttcagcacagggtgtaagcagaatctcgtgaaactagaagtcttgacatgtttattgtaagatagacataaaccttgctaaatgcaatgaaaaatataacatattgaaaaaaccatataaaaggacatcatgaaagcagttcaacctgtcatttcgtatggatttaggtagcaaaataaaaacatcaatgcctagcatgaatagtgaagccaaaagaaatagggatcactatttttatagactgaatatgtcaattaatgcttgtaagaacttggatacagcaacatttcagtatcatcactgcagtaaagcatcatatgcctatgtaagtaatcaaaactggatatttttcatattcgtcttaaatgaatatgcatgattgacatgattaggcctgctcaaacttataatgaaatcattcatacttaggcatggctcccaattgcttatatcaggagggagcacatgttacagttgttggacttaagaggaaaatgcaactactgatgcatgccacgccttatggccattgcccaacattaaaaaaaaaaaaaacaaagcaactacgcatcttattaggctgggccttctaagagagctagaaatagtcctaaatgtatggtaagtgcagcgatacagaggtagctgacaatattttgacatattctgtggttaaagatgtgtttaaagacatactgatgggaaaagatgaaagccgtttcaatatgtttaagaacaagcgttatattatattactgcttcctgaaagacttagacacagctgctacaataatggttcatctgcaaaggctagtaacatcagtcaaatagacagcccacaagtgagagatcctagggtgtatgattatactatatatttttatcaggagtaccatgaaagaatcaacagtcatgtctcattatcagtagatatgctcaggctctggcctggaggactagtgagaaaagaatggaatgcatacggataataagaacgcaatgaagatattgccagcctttgaacaatgaccataaataataattcactaggagtttaggacaatgttcgattgcatatatattttgtgactataaataataatcaactagcgcagtggggtgaattaggatgattaaagcagttaaagcttacaatctaagcttgcgtcagaattttacagtgctgttagcatacctcaggaaggtacgggagtgaataaatcagtgaatcgccatggccaacttgttcagagggggagttattagtgctacccactgtacaattcgatttatctgcagctgaaccagcacgattataattataatagcccatcagactgacaagaacacattagagagagagagagagacaaacaacgtagggggctaccgaccaatggtttattgggataaaaagatcaagaatttttcaacgaataaatgcagatattatggggttaaaaggagctgaatcggtgacctaacctagcaaagcagcaacagttgaatgttgtgcaaattataattcggtatccatctaacattagtcaacatgaaccgattagcgaacaagaactgatccaggtgagacgaaccagagacagggctgggaggcaaagggagttgaggcttactcatgggcagggctggggctagggctaggttttgccaccgctgctcgcgttgcacggccacggaggacatggcagatggcattcaggacgacgataactctctctccccccttggcccttggatctcagactctcctacctatctatatagctcttctagtatgagagttctgtttctggtttcctctccaactcgttttttattcgattggagctggactttactatatgtcaaaacggattattagtaataaaaaacaattttatgagtctcaaatagaaactactgctacagcagagtccttaacgacttaaaaaaacaaatattcaaatagaaactactactacagcacgatggattgggcacgattaattaggttcagcccgacgggcgtcgtaggacagcccgcaatgtgcagacattcgtttaattaggttcgtcaaccagcaacaagactggattatttcacgtgaaaatatttacacaagcacatgagtactccctgtcccaaatcaaactaggaacaagagagggaaacctaccaagagagggaagaaaatacaaaattgcaaaaacaaaaaaaaaacaagagagcagtgaataggaaacagattgaaagctactagctcaagaacatgcaagagaactcatagattcagcagagccacaagcactaatattgctaaatgacatgtcaagtgattaacaacatcaaacagctacaatctttcttgaaaactacatcaaacagctacaatcctaacacagatcgacattgctcaactttgtgtaatatcatgattagaaaattctcaatctcactcttcgtagtatggtttaaattcgattccctgcgctgaagtataaattgatcggtcaatacacagcatatttgattgcacacatcaaacaaatcgcaggagtagagtggcacatcaaacaaatcttgaacacgaaccgaagaagaaggaggaaaaagaactgaccggccgtcgtcgctgctgcacaaggtgtggccggccaattggaactgcaactctcttccatggcagatctgccaatggagctcgaagtagttgcctgctcccacgccgatggagcccttagagctggaggcggcagcatgggcagcatcgcagcgatggacggcgttcgctgctggatggatgggcgacgagtaagtcggcgtcggtgacgagagtagcggcggctgcgttgccgtctcgctgcccagcgacgtctccccgtctagtgcaatcgtgccctaatgggccaaaaaattttgcaattcgcgggcatttttgtgggggcgggactgcgggccgcaaaaaaagcccgccccacttgcacccctagacacgatgcagaatcgctagagatggtaccatgacttcacggagacaaacagcatgctactccatccatcctcaatggcgaacaactgacacccagtaattaagctcgagtatacgagcttcgaatagagactaacagaacaatgatgcaacgggcaaacagaacagaagcaacgcgactatgaacaaaaaggccataggctgaatgctcaaaaccataccatctcagcaacaggcaaagacaatttggtttggaggttcttaaaaggcgccttaaataaggtaaacagtcgcattacagctagcagcaaacatgagttcgcgaattgatcaacataacattaggcaaaagagctcaaaaaaggatagtctggggcagatagttctatatccttgcaaacaactcgctatagcaaaactccaggcagacgcagcagcagattttaagcgttggcagcagcctgggcggcagcatcccgcttcctttgctcctcgatgatgctgagcttgatgcccttgcccttgggcaggctcacccaaggcttgttgcccttgccaatggtgaacacattgcccagacgggtggcgaattggtggcccagggcatcctcaacgtggatggtctcgaagctgcctttatgcttctccctgttcttgatcacaccaacacggcctgtgttccttcctccagtcaccatgacaacattgccaacatcaaacttgatgaagtcgacaatcttgttggtctccagatcgatcttgattgtgtcgtttgccttgatgatcgggtcagggtagcggatggtgcgaccatcataggtgttcaggtaggggattcccttctggccaaactgcacagaccgaaccttgcaaagcttgaactgtgcacagaaaaattagaatcagccagcattctaacttgaattaatacactcaaaagtaacggaatgcacaatgctacaatcagttcttctctagaggtaaactaaagaagcaattctcaataacagttcaatcaaagcaaaatatctttctcagcacaacataaatttcattatttcaaacagaataccttcatataacaagagtgtgttcagcaagaacagtaccaaaaattaatatgtcctaaccttagcatcctcatccttgacagactgaaggcggaaacgtcccttggtgtcgtacagaagcctgtagttctcaccagtcttggggatggaaatgacatctgccaaaaaagaatatgtttagcacaaagcaccaagtgtttttacatcatacactgaagcatatattgattgcaataacgattgagcatacccatgaaaccagctgggtaggtcttgtcagtcctgaccttgccatcaaccaagacatggcgctgcatgaggatagaaataacctcacggtatgtcagagcatacttgagcctgttcctgataatgaggatcagaggcaggcactccctggacttgtgaggaccagaagatggcttgggggcctatggtaaaaggtaattagaaatataagctatcaggtaacagaaaaaaaaaagataagcttcaagcatgtgtagttaagtgtaaacaagaatgacaaacttacaaaagctccaccaagcttgtcgagcatccaatgcttgggcgcattgagcctcttcagatgcttcttcaaaccccttgcctggtattacggtaagggaaaaggaaatgatcagcacaaataacaacataactgcagagtagcacgacatgaatacaatgacacaatgaaatcacaaggttatgaacagccctaacatcgctcatggcaatggtgcggcatggtttctaagtaatctttgttaattcttaacaaaaaaggaatctagacaccagaacctataatccttgaagccaggcagatatacaagttgaaccttggcacgtaacagaaatgtagaggaacaataacgcagcaaacagcacgagctaaaccctcaaactagcattgacagtacaattatacaaagcatactgaaaataacgagctgtctaagatcccacaaatgggcgacagccaaggatgcaatgtccaatcctagactctactactagaagcccaacattgtgcatagctgttcattctcgcgcaacgctgaaacataaccactaggaactgatccacaatctgaagccagccagcgagtacaaattcaacataacatgcgtttaaatcctaacaggctgtagcgtggtacaaagctatctactcaacatacgaatcctacacatcacaaagaaatctcatggaccaagagcaaaataaccaagccgactactaagctactacatcctagcaggccacgcgccgcacacgaactcccactcagggagagcggggaatggaactaatcccaccgaagctacgaacgagaaggatgccacagatcagccagatccgcagacgcgagagagcgcgcgggggggagaagcataggacggaggagagggggtagggggctcaccatggttgcgaggtcgggctaggtcgccgtgctctgccgccgccgcctgctgcttcgtcctcctctgctccgcgccgcgccgccgccgagatgacaagagtgggagagcgagggttggagaggctatatatactagttggtgtagggttttagttcaccggatttacgagtttgccctcccgctcccctcatgggcttccacgatttattccagaaattacggcccgttttaagaccctcatggctgaattcatggcccaagtagttagatcgggcctagtttggtcccgggttgcttggatcatttgcttctcggcccattagactcttacatggctgtgatgcatcgtgggctgtattcttgcagcttaggtgaagtgacagattttatccaataaatgggcccatgtaacacaattaagagcatgggccgaagtgcagggttgcagcttgttctttcggtgtactttttccttaagataagattacaagcctgaattttacagagcagcacaaaggcccagacctcaaccaaagagagcagaaactgaaatctctcaactctccaaagtagttgttgtctcttctacaaatacatcacacttttgattttaatttttgaaaggagctacatgccgtcgtgagttgtgagtataacaaactcacactttgacttgtataacaaagtcgtttttcatgccatctgaaaatgacattgcaacctgcatatctctagttatttacaacagttggttcacctttgattcaggcggttcaactaggtaggtccgtataggttttgttataactttttttttttgcggggaaacaaggatatattactcagaataggagttctcacaaagcaaatgtgagatagcaatacaagagtcatccggccagaagtaagttaaggattcacttcggcctttatttgctaagaaatgattaatgctattctgagtcctgtgcactttattaagtgcaatcacccttgttccagccatcggggaagattaaggggggaagaaggggcggacgctgggacgtgccacgtcggatttttgctacagtcctacagtaccggggctggtctttttgcgaaaaataagttcaatcacctcgttgactacgcacgcatcagcagacaataccttattcactgacttgatcagctggattgcttcttggcaatcggattcaacgacgatgggcagcagagtccattggagggccagggctattccatctctgcaagctagcagctctgtttctaaagctgatctgcagcgactaatgtggccacagcccaaaatttcctggtggccctcttaacagctggggcaacactcttgtcagctcaaaattcagtgcaatttctggagctgattttgagcaactacagactggcagtaggggttgcgttgaaggatattgagccgaaagacattgttcttggtcgatttcttgccctccaggtcacaacacgactgcatgtgccctgaaaatcgagacgttggtgttccttgttgttttctgcaatcattgcatgttatgttattgtggagattatggatatcccatatctacacggcgatgatatttgggctgaatataggataccgaatatagatagaatatcttatgtgtatcttgggtttgtttctcaacttgtgcatcaaggaaataccctgagacttagtcggtcacgactgtattttatatgtatctgcatattccgttagggatatagattgtcttttgtaacacggactcctccccatatataaggggggtccgggtgcctctaggggcatatgttgtttttccccaaatcatacaatcaataatacactcggcggattcatccccggacaggagtagggtattacttcttttataagaaggcctgaacctgtataaatcctttgtctccaaacccatacacttttccagcttgatagccacccccttttattattgccgaaatctagtttcgacagttggcgcgccaggtaggggttgcgtcaagcttttcgccgatcagtgcaatgggttccatctccggcatcgacgacctcgtcttcccacccgggcagacgtttcggttcggcagcctcgacttcgtcaccaacaacttcggcaagatctctctccttgactcggagtcggaccagtcgggagagaaccagatttcggccccgtttggactcccaaacgcggctgaaagttacttcaagaccatctcgaccgagtcggcttcaaaccactcgggcgagatcgcatcttcaccaacgtcaccagatcaagatgatggggcttacccaccgatcctgatgaagctccccgacgatttggcggccgtctccatcacgacagcgtctctttcccgtaggcctaggcggaagtcggcttcaacaccgatttcgcctagcttcagggaagttggcgtcatcctccaaccactcggcacggtttcgacggatcagctagatggcgactacagctctcctaccgtcgactcgcgccccaccgacatcgtggagtacgacgagtttagctctcgctaccacgacccggatctcgacgacttcgacggaagcctagatgacaactacacccctctctattttggcgtcttcatggccaataacgagacggaggagcaacgccaagcccgggagaccgaagcgcgtcgcgagactgaacgccgccgactggaagaggagcatcaagcacaagaacaagaacggttacggcatgagcagcaggagcgtgagcggaccgcgaaggaggctgaggatcgacggcagcgagctttggaagcaggacgccgggcgcgtgatctcatcggccagcaagatgttgaagggacgccgatttttcgcacccctcaacagaatgcggttgccgcgatcaccctcctcgacaccctactcagggaaagcgagctcaatcaatccgatcacgtcgtcaacatcttgaaccagacgaagactatgattgcggcttcggtcccagttaactccgaaagcgtccacacgccgactggcagccgagtcccccacttccgatctcatgactaccgtcatccaagcctcagcatcaccggcgcaggatccaatcgcaggagcaggggccacgacgagcggtctgttcactcacctcccgaccaccatagggagcgccgagtggaacggcctcgctcaccacctcgtcgccgccccgtcgatcttcgcgacacaatcatacagcgccgcgcagctcgaggctatcatcactcgccggaccgccacgacgatgaccttgacggagtagcagccttcaccgacgacctgcgtcgagtggactggccagccggcttcaagccgactggaatagagaagtacgatggtaccactaacccagaatcgtggcttaccgtctacggtctcgcaatccgcgcagcaggaggagacagcaaggccatggcgaactatttaccagtggctttagcggattccgcccgatcttggctccatggattgccccgtggtacaatcggatcttgggccgagttacgtgaccacttcatcgccaactttcaaggcaccttcgagcgtcccggcacacaatacgacctctacaacgtcattcagaagtccggagaatcccttcgagattacatccggcgattttctgaacagcgtaacaagatctccgacatcaccgacgacgtcatcatcgccgcattcaccaaagggattcgccacgaagaattggttggcaaattcgggcgtaagcctcccaggacagtcaagctcatgtttgaaaaagccaacgagtacgccaaagctgaagacgccgtcaccgcgtcaaagcagtcgggtcccagttggaagccaaaaaaggatacgccggcttcgggaggaggtggaagtaacaatcataaggaccgcaagcgtaagcctgcagaacttgttgcaaccgccagtcactcttctcgacagcgttcgcgcgtcaacacgttcgacaagatcatgaactcccaatgcccgcaccatcctaactccaaccacgtggccaaagattgtttcgtctacaagcaattcgcggatcaatacaccaagactacacggaagaactccgacgaagaacaaagcacgtcgaggaagaaggacgacggcgacaccccggcaggttttcaagaccaccgcaaggagctcaaccatatcttcggcggccccctggcttatgagtctaaacggaagcaaaagttgaccgaacgggagatcaatgctgttcagcccgacacgccccaatatcttcgatggtcagagattgcaatcaagtttgaccgctcggatcatcctgaccgagtggtccacccggggcggtaccccctggtactagacccagtggtccgtaatgtcaagcttcgcagaaccctcatcgacggtggcagtgcactcaatatccttttcgccaagaccttggatgatatgcagattcctcgctccgagttaaaaccaagcaatgcgccttttcacggcgtaattccaggattatccgcaactccactcggccagatcaccctcccggtcacttttggcactcgggaaaactttcgcacagagaatatcagcttcgaagtcgccgatttcgagacagcataccatgccatactcggacgcccggcattagccaagttcatggccgtcccgcactacacttacatgatgatgaagatgcctggtccccgaggagtcttatccctacggagtgacatcaagcaagccgtcacatgcgacaaggagagttgcgacatggcccaaacccgcgagatagcgtctgctcgagaggatatccgactggctgcagccacggcggacgaaggagaagtgcccgctaccaagacttcaaaaagtggagaaagcgaagccaagactaagaagattcccctagatccctctgatcctactaaaactgctgtaataggcgccgagttagattgtaaataggaaagcgcgctcatcacctttcttcagaacaataaagatatctttgcgtggaaaccatctgatatgcccggtattcctagagaggtgattgagcactccttacatgtcaaagaagacgccaagcctatcaaacaacgactccgccgattcgcacaagacaggaaggacgcgatcaaggaggaattaaccaagctgttagcagcaggcttcattaaagaagtccttcatcccgactggctggcaaacccagttctagttcggaagaaaacagggcaatggcgcatgtgtgttgattacactgacctcaacaaatcctgccctaaagatccttttgggttgcctcgcattgaccaggtagttgactcgaccgccggctgtgagcttctcagttttttggattgctactcggggtatcaccagatccgactgaaggaatccgactgcttgaagacttcattcatcacgcccttcggggcatactgctacgtcaccatgccatttggactcaaaaacgcaggagcaacttatcaacgtatgatccagagatgcttctcaacgcagattggccgcaacgttgaagcctatgtggatgatgtagtcgtcaagaccaagcaaaaggatgatttgatctcggatctggaagaaaccttcgcgagcatccgtgctttcaggatgaaattaaaccctgaaaagtgcaccttcggagtaccgtcagggaagctgcttggttttatggtgtctcatagaggcatccaagccaacccggagaaagttactgctatcctcaacatgaaaccgccaagtacccagaaagatgttcagaagctgactggatgcatggcggcgctcagccgatttgtttcaagacttggcgagcgggggatgcccttctttaagctactaaagaaaacagatgatttccagtggggacctgaagcacagaaggccttcgaagatttcaagaaactcctcaccgagccaccggtcctagcctcaccacacccgcaggagccgttgttgctgtatgtatctgccacctcccaggttgtgagcactgtcttggtcgttgagcgtgagaaagaaggccatgtccagaaagtccagcgaccgatttattttgtcagcgaggtcctagccgactccaaaacgaggtaccctcaggttcagaagttgtcatatggtattttaatcactaccaggaagctatctcactactttcaaggtcacccggtaacggtggtcacatcatttccactcggtgatatactgcacaaccgcgaagcaaacggacggattgcaaagtgggctttggagttgatgtctttggacatatcattcaagccccgaatttcaatcaagtcccaagcgttagctgattttgtcgccgaatggaccgagttccaagaggatacccccgcggagaagatggagcactggaccatgcattttgacgggtcaaaaagactttccggcactggagcaggagtggttctaatttcaccaactggagaaagattaagctatgtactttggatacatttttcggcgtcccacaacgttgccgagtatgaggccctccttcatgggctgcggattgcaatttccctagggataaagcgtctaatagttagaggcgattcacagctggttgtcaaccaggttatgaaagagtggtcctgccttgatgacaatatgatggcatatcgacaagaggtacgcaaattggaagacaagttcgatggactcgagctaagtcatgttcttcgacataataatgaagccgccgacagacttgccaattttggatccaagcgcgaggtggcgccttccgatgttttcgtcgaacacctttatacgccgacggtacctcacaaagatactgctcaaattgcgggcactcatgacgtagctatgattgaagccgactggcgagatcccctcatacgatttttgacttctcaagaactcccttaagacaaagatgaagccgagcgggtttcaaggcggagcaaactttatgttatgcatgaagctgagttatacaagaaaagcccttcaggaattctgcaacgctgcgtatctttagaggaagggagacaattgctgaaagacatacattctgggatatgcggaaatcacgctgctgcacgcaccattgtcggcaaagcttaccggcagggttttttctggcctactgcagtgtccgacgccgacaaaattgtgcgcacgtgcgaaggttgccaattttttgccagacaaattcatttaccagctcaagagttgcaaactatcccgctgtcttggccgtttgcggtttgggggctcgacatggttggtccgtttaaaaaggcagtcggtggttacacgcatctctttgtggccattgataaattttccaagtggattgaagctaaaccggttgtcacaatcacagcagataatgctcgagacttcttcatcaatattgtgcatagatttggagtgcccaatcggattatcactgataatggcacacaagtcactggcggagtttttaaagacttttgtgaggactttggaattaagatttgctatgcctcagtggcacaccccatgagcaatggacaggtggagcgagccaatggcatgatacttcaagggattaaaacgcgtgtctttgaccggctaaaaccctatgccggcaaatgggtgcaacagctgccatcggtgctttggtctttgcgaactacacccagtagggccacaggccagtcaccttttttccttgtctatggggcagaagcaatgttgccgagtgaagttgaattcgaatctttgcgctttcgaaatttccgtgaagaacgctacgaagaggacagagtggatgacttgcaccggttggaagaagtccgtgaagcagctttgattcggtcggctcgatacttacaagggttgcggcgttatcataatcgcaatgttcgatcccgtgcctttttagtcggcgacctggttttgaggaaaattcaaactacacgggatcggcacaagttatctcctttatgggaggggccatttatcatctctgaagtcacccggccaggttcctatcgactcaagcgagaagatggtactctcgtcgacaactcttggaacattgaacatcttcgtcgtttctacgcttaagtttatcattgtacttccctatcttgactgtcaacatcaagttttcttcttgaagttgtcagtcgggggctattatcataataatggagtgtgattttttatcaattcaatttgcttacttggtttatcattgccttgttcgatttttctacttagtctgcgaggactgaaagtttttaatagcttctttgggttttaggctcaacaaagcttgataaaagcttttaagaaatcaaagatttggctggaactatcaagcacagcataaatacaccagtattgtacaaattgagcctccatttgttacattcatactcagtcagagtcagtcctttcatcatcagagttattgttgctcggctgaaggtcgttgttgtggaattgctctacaacgtcacttgcaatcttgtcagccgcattttgagcattgttgataagatcaagagcagcctcttcgcttgtcccgtctgcaaatccatcaatggtgtcgatttcaattctcgggtacaaggatttggtcatcgccaatgccatgctagctcccatacttccagctttcttgatgttcttgaaatatacatccggtgcaactctcagcttgtcaaagatttcggttgcgtcaagtgcactcggaccactgttattaaggaacatagcttggacaagtggtgtagcgacattggcaacttcatctcttgctccttcaagcctctggatcttaccaaccaggacgtcaaactgagcttgagatttgattttacggtctacaaaacacatttataataagaatctgctgcattaaaaagaggaaagttcagattgtcagctggcagtaccttcaacctccttcaaggccgagtccctttcagcagctagttctgttttgtcttttctcaaggcttcaatttgcttctccatttgagccatcctggtggcttgcgctgtttgaaatccaaatgtttgaggatccagttatgacagcataaatgggacagatctagagattaccttttgatgaaccactcagctcgtagtttgaatcctggagctgagcaattcgttcccttaattccttctccgttttcttggcatgctccttggcctcgtgtagctggctcctaacggcttcaagagttcccaaatgaggaaccagcttttctaaggttgtggtcttggcctcattgcgaagatggattctctgcacggtggttcatggattagttttgctaacgagaaaacaaagtcattaaaggcagtcacctagaagacttacattcacaatgcgagtagcttctccaagtactttcttcagctggcacacttcctcatcttctttttggcgatttatgacaatgccggaaacttgagagttctcgtcccaccatttgagtaagataggaggacgagagtcatcagctgcctttatgcggagaatttcttcttcgtcgccgcctagtggacctgatgtattcccaagacattagacgagtaagctggagttattcagaacggcatcacttgagaagatgagttacctgaggatgtgcctagctgagcgtgaggtgatccctgctctttatccggagacccaatcactgagtcattaccagcctctggtccttgagaagttgtcgcctgcgcttcagcttcaggaatctcttgatttagacctacatccgactggtttccagtcgggggctcttgggttgttgcagtttcagtagctgccgactggtttccagtcggcggctggtcactcggattggccttgtcatccgaagcatgggcgccagtcggctgactttcggcagtcggctggctttcggcagtcggctggttttcggcggtcggatcagcatctttggataaatttgactctgtggcagccggatcaggattttttccagttggatctatatcggacggtttcctgcaaagtgtcctttcggtattcagcgtaatttctatgagagaagcatgccgaaataaaatggtaccgagaagtttatacctggaagatgttctaatctttggcatttgacggccagccagttttttcctgggcatggtatgctttgggagtttattgggcgtgcccttgtccccagatttgttgctgtcatcgccttcgtcgtcattaagcaccagctttctcttgcgagaacctgtctgcccagccggtttggaggtttgaggttgcgggtctgacctgattgtcggccctccacttccctgaacggtgtgctggcgaggagatcggcgttgagcaattgggggatcagatttcatcaatacgtactcctgaatgagatgcttccacggttagctcactcaacatgaagataaaattatgttttggtcatgagttgaaggtttcagatacatacctgtggaggcggattgaatgcattatatggtacaactggcagctgatgtgagtagctgacgacaatagcatttgagaagattttatacattctctccttcatgattttaaagtccagagagtctgggtcttcacggtttggatcatgcttgccgtcaaactcgaatgctgtgcgggatctctctttgattggagctaatcgacacttaatgaaatgccgagtgatttgctctccctgtaagccttgctctttgagcttcagcatgcgttccatcagttctaaggcttgggcagcttcatctcccatgggaagagagttccaggtatcttggtatactgggggaagacaggagtactcaggaagagcgggctcgggattttgaatataaaaccagttggcgtgccatcctttgtttgaagtcttgaaaggcatagagaaatacttctggctcagagtgcccctcagttgaaatccagccccaccaactacgcatggtttgtttttgtttggttgaggcttaaggaaaaagattcggcggaacagagcaaaatgaggtctaatgcccaaaaaagcttcacagacatggacgaaatttgcaatatggactatggagttcggattcaaatgatgtaagctgattccatagaaattcagtatcccacggaagaactttgaggttggaagagcaaatccaccataaaagaaatgagagaagaccacggcctcgtgtgtatcgggggtcggaaaagcctcatcgcacgctggccgccacccgatgatctccttggcagggagaacgccgtgcgccaccatctccttcaggttctcctccgtcacgtcggacggcgcccattggccttcgaagctttctttctcttccgccattgattttccccgaatacgttgatttgattcgagggatggcttgggagagatgaggaattgaggcggtggatcacgggaaggattttgatcactttttgaaggtggatttgagtggaatggtgaaccctagtttgccggcgtagctctgtactgtagcaaggagtggggaaaatggcgagagttccggcggggaagacgaagtgtcgcttggatctcgggttttcttgttaagggtatcggaggtgcgaatgggcctaggcctgaatagtatctcagcccaatacttttaacagcgtggcccattgtgttccttagggacttaggcattttttgctttggcaatttatgtacacaatagtgttgcccaatgctgataaaatcctttttacgcggtcatataattctttggaattattgcaatgcaaattaaaaggtgcccgacagaaaggcgttatgctgtttttgtacgtttttttaggctacaaaagctgtctgggttaacttggaatgacttgtttttatcatagtcatttcctcggtatgttatatgcctgttttcattgtggtaaatagtcatagcctaggctattagacttattcattaccatgatttttataatatttggtgggtaatctttagagtcttatattcggatgcctgtcaagtgtgttcattcgtgaactttttagagtgttaaccacttggatttcttttattatggctaaaaagcagtcggctggaatgcctctttaggcgccgtgtatgcttttgtcatatgatgcataattatgctattattttgttctcaactatatgtttagtttgttaactaatcacatagttggaggctatacctaattaggtgcatctattcgatgcaccatattctttatcttttcgccctttacagtcttcgttttcgctactcggcaggccttggcatgaaaagtttgaagcactcggattattatctttgagcaggctatgatggttgactgcaaaggtctcgggggctactgtggagattatggatatcccatatctacacggcgatgatatttgggctgaatataggataccgaatatagatagaatatcttatgtgtatcttgggtttgtttctcaacttgtgcatcaaggaaataccctgagacttagtcggtcacgactatattttatatgtatctgcatattccgttagggatatagattgtcttttgtaacacggactcctccccatatataaggggggtccgggtgcctctaggggcatatgttgtttttccctaaatcatacaatcaataatacactcggcggattcatccccggacaggagtagggtattacttcttttataagaaggcctgaacctgtataaatcctttgtctccaaacccatacacttttccagcttgatagccacccccttttattattgccgaaatctagtttcgacagttatcttacacttaagatcgatcgaccgggcacacaggtatcgatcgatcgttctttaaacaattgcattattgggatcaattatttgggaaccatttctcggagaatctgtatatccgatacttaaagaaacagaattattggagatacacactcatagctaagctgctgacaatgcacaacaagtgtcaaacagaaacatccaacagcatctcgactctctctctccgatgactcggacagacactcaacttaacttccttgccctcagctgcttcatcaagctagtgacaatcagtttgctcgagctaattaagaaattgattagtccatttgggctactagctggcacctggcaacagcatgtgccaatcattaggctatgccaagaactcaaagctgctactagctcaaatcagtgtgctagctagctaaactccatgaccatgaccatgagagagtgagcttgtgatgggatgaggttagatgagaggaggagattccggatctccatgagtggtggggctgagcacagccaccagatagaattatttccttggggcctacagtgtcacttttggcccccaccccaccatggctagctgacatggcatctacaaatacagtacaatatatggcgccaacttcagatcagcctcaaactcaacatgtgatgaggatagattgctgatgtgctgtattgctattctagctctatcaatggcagtgctgttttgcaataatgttcatgaaccagaagatccagcagcttagctagctcaataatgctactagttctgaattgcctagctcgatctattggcggcattcactgttggtctactggctagggttgcttcttgtcatgcgagaggccacaatttcttgaagaaaaaaaaaagaacgaaccatccacgtggagtaaaaagcaacgacgacgctttcatcacacaagaggacatccttatttaatttgagaagcgaccattggaatgggtggaataaatcgtatacgttctacctgccaagatgcacgcgtgaatctcactctttaacattattattattattatactaatccacgtgtgttttgaataatgcagcaaaattttcaacaggtctgaaggtaacatatagccacgagtttggagaagatgaggggctgatgagatgtgatgtctagctgcaatcggcgacccatgagccagctgatatatcgctcatcataatcacattcatattaattaaatgactaattggcaggctactactccagttaatagaatgaatgaatcgtgttttttgatgccacgtcgagaccgaagtttgcattattgcaacacgacgtccgttagttaggcgcgtatatgtaactgtcagcacccatgccatatgccagcactttaccttcatctcatcagctttatatgcatcgaattgctgtcacaagtcacaacatcaactgctactatacatactagctagtaacatggatgtctgctaagagcatcccagcagctcattcaaatttgatcctccatatgctcatatggatgaccatctaaaaagattcctcattcatatttcttctcactccaacagatcatctatattgcatctttcatatcacacccttctatattttactaatatttttcaactaaccatacatttgtattattttttaaagactatattttaaacaactaaattttaaattttaaccgtgttatttatcctgataatttaaatgagtttattttaatgaatatatttttaatggtccggaccttttttttctcctcctctctactcgttttctttcctctttccgattcctcttcttctctcctcttctattcctcttcttcttctctccttttctccccagcgtggaggcggaggctggcggccgcggcagcgcgacgggagcgggggcgctgcggcgcgacgggccgcggcggccgacgggggctgcggcgcagcggcgctacgggctcggaggcgcggcagccgacgggcgcagaggcgcggcggcgtgacggccggcgtgtagaggcacggcgacgcaacggccggcgtgggttctccttctagatctggtatgtctctccctctccaccctcactccatagtgaaaaatgcacatccggacggcgacgacgacgacattggggaggtcgcggcggaggggaggtcaatccggactccggatgggggcgggcgacgctggcggttaggatggtgtgaggagagagaaacttcaaatttgacgtttctctctccccggatggaggatagctaaatttggatgctaggatggagtatctgctggagctcatttttcttctcccaacctctattttgtggatagaggactagatggagtatctgctggggatgctctaatatatactatatgcactaataactccaatataggaaaacacgtttctacatacatatatataggagcagtgatagtgattactacatgattacatgtatgcatgtagtactggaaaattaactgaacagagtgacccgtaacaaaactgaacgaaataggcttggtttagttcccaaaattttgttcacaaaaacatcgtatcaaatctttggacacatatatggagcattaaatatagataaaaataaaaactaattgcacagtttgcatagaaatcgtgagacgaatcttttaagcctagctaattagtccatgattagtcataaagtgctacagtaacccacatgtgctaatgacggcttaattaggctcaaaacattcatctcgcggtttccagacaagttataaaattagttttttcatttgtgttcgaaaactctttccaatatctggttaaacatccgatatgataataaaaaaattttatttcatgaactaaacagggcctatggcagattgagcgcatgttctcctacggcgaagcaccatgcatccatgttctcctgtctagctattggcctcaagatgcacgtacggattatcaaactgatccaattcaatgtactgttagcctaactgcctaacactagtccatatatatttctctgcttttccctccaatcttcattcacatgacaaattccggtaagtctttgtgtttacgcgtgcatttctaccatgcttatatgtaccatgtttcgttttatttccagcctggtttctttcatgaaaatataatgatacagatacaaacaaatcttataaaaactcggtttcaaactcttttttatataaaaaccggtgtggctgcatcttaaaaaggattatatcttgaaatagtaacaaaaagaagtataatatagtgtgtattacgggcgacgacaagatgggttgattacattggaagtttatagcgcacgtcaattagggcatcctcaatgtttgtggtgtaatgtaaccttaaggtgggccctataaatagtgagtcattattatagccatacccacaatgctatggttaaaatttagccacaagatggcccacttagaatggaaaaataattgtttcatctcttgttcatgaagtgaatgagagagaaaaaatattttctttttgtttgtggtagaacttaagcataaggtgtaccctaagctaatgctactttccacaatatatatggctcactttacaaatataatcattgccttaaggtgtcgtatcggatggcttgcctaccaatctgcctagtcagcatcgaccaaagcacaaacacgtgtcgcgttggaatcgatcgcctaattaatgtgtggctcccacgctcacgacgacgtggcagcagcccgcctgcctaaatgtccggaagcaatcacagccaccattttccacttcccccatcaatcatcaattggatgatgcatgaatgccttccttttttttaaaaaaaaagaaataaagaaaaggcaaaagctttgccttgtagtaggaggcatgaatgccttctggtatcaattcttcctcaacaattactcctacctatctgcaaataaaataacaatactacaagatatcgattgaagtcatttctcacatctctcttatataggtggtgttcttttcttctaaagataaagatgaagattaagtttttttttacgtaaaatgagatgatattaacatatggtagattaagttttaattattacaaacttaaaaaatagattaatttgatattttagagtaactttcatatagaaagttttcgtatgaaacgcaccgtttagcagtttgaaaagtgcgtcacaaaaatcttaatcttcatctaactcttgttggagaaaagaacacggccaaatgttgatgttcattaacaccatagtatataattcccatcctaggtaagcgcacacatatatatactacatcacattttgtattgttctactccaacttgcttgaactaattaatggcaatttactccctctatcatcattagctaaataaaagacgcgaaaaccaaagacaataaaatctctatggttttaaaattaattctcatcgatcaaagtgctctatcaccgtgtcccgcggattttgcatcatactttaaatattggatggagttgcaccatcagaaattaatcttggatagctgcatatatacggtggctgcatgtgtagcgcattcaacgacgtccattcactctttcacaaatagacgaagagagacccctattatatgatgattattttgagaggatcacaaaaatattaggtaaagattatacttggacgtatttgtataatccgcatcagtgaagctaacaaccaactccgcatcactaaaattttgtcacaaatttaagaacttatggttaatttgtgtttgtggtgttttcgctctttgtcgttgataggctagcaggcattccttactagtcaacatttgtcgattttgaaatttgtggccaaatcattactgcaacgaaagaaagcttttcatttttcttgcgaatacaaaaggtggtggaagaaagaaagaaataaggaagggagaaaatgtaaacgttttactaattaatttgcttgtgcggcccaattaatctgttggaaaccatcgccatcaattcagaaacaattaacaccagatactacacatgcattgtttgtgggccactgaatcatctgaacaaaagcaaattcattttcataccgagtgaaaagagggagaaagagaccgtgcagtgtggttgtgtaagagataatccgataatatagctagtgacttggcacaaatttcaggccggagaactattccaccacgtggttgatctggtctactcttaatttcaagccaccagctaatttgttttggattggccagctactagactggttgatgatttaccactactactttttataaagagaaaggcaaaggattactttattgataaataaaataaaacaataaacattcaacagataattgccgtggattatatacttgattatggggtaaattaaatattttgagaaacaaaccaaataaattgtagcttagaacaagtggtgtaaataatgcagtagaaatcttttcagaggcttggtgcaaataattcatgacaataatttgacaaattagctgaaaagaaaattaataaagggctgaactttgctcagctgacctagcgaagagacaacttacggacctcatcttttcacttatgcttatgcttatcagacaaaattttaatttttaaccttaaatttgaggctgattttgaggttttttcatcaaagtttatttttcagcctttgcttttagatcactaagaacacgtacataaaagttttattcacatgttacttttcgttatctcattatggttcttgtccttagttagttattacataaagagagtaaaaatggcttatacacatatggctgttgtataaatcattgtgtttcctgtggtaattatactgtggagtgaagcacagtcacgagttttcactccaccatcgtcgtggacgtacgtgtggtccatagcatatgcgttttgatggctccaatatatacattcagtagtcttctcttccaatcgtacgcgttgcattattgtacttggttgatttaatgccatttcatatccatatcacacgtccgctagctaaattaacattccaagccgccgcttcccccgtcatagaaatgaatcaaatcattctatcaactgaacttattatatttgtgccgtgtgaggcattatacatgcgaaggtaactatagatatcattactggcattgtgaccaatgcaatgaactcgatcgtaaggtgagataacgcatatataatttgtagactatgttactgatgatacatacatattcgatcagcagccagcaatacgtacagttccttttctgaatatgtttgtctgaagattgtgtgtatgaaagtcacaggttaatctactccatgctagcacagcagctagcatgcagcacctgtggtttgggttatcacaggtggacatttgatcgatgtatccagaatgtgcagattaacgaatgaaacagacatgacatctgctcgctgctgctgctagtggtagagatcgatcgctgcagctgcatcgcatctgcgatcgatcgatccagtcggctgaaggcacatgtatggcgatgcgatcaccgaacgaggattctgtctgctatcagtctcagagctagctagctaactgacgacgaaacagcaaatcaataatgctagctatatagctagtgccacttggcataacaacaacgatatgatgcagagataaatcatcatatatccatggccatggcttatacactgcccatacaggaaacggagtatatggtcatcaatcaatccatcgctttctcaagttagctgaatacgaagttggcaattactattaattactagtttctttttttcttaggtaatggatatatataaaaatagtggctggaaatagatggtagtcgttgccctttattagtctgtactattttctgttgtgttgttttcggtctctaacgtgagagcatgtaggcaggatcagggcacattttgtccaatttcaccaatgtgtgttttgcttgtagcctttcgatcatttcatttgcttgctgaaaagaacaagctagccatgcaaggcaacgaaatcaagagagactgagagaaagaaaaagaaattaagaaagaaagaaagaggaaatggagggtttgcttgactactggaccagcagcaagcgatcgacagaagagcacaagatagacttaattggcagccatcgtcgattcgcaagttaagaaaacgccgataaattatttgtgggccatggaatcattggtgcatctcgacaacaataattcactttctttctcttgtccatctcttcttcctcttctctttcagagagaggacagagacagagagtgaagagagaatccaatagctgtgacgtggtgcgaaattcaggggggagaagagctcaaaacttcaccaccattaagtgtcaccttccctccacgtggctggtctgcccttacatccatcatctacgcattggccaccgattgaattgttttggatgatttaagggattggtgagggatagaactgagttcatgatagttattatttcgaggatttaaatgaatgcagtaatgaaattgcggatctcctgcttctttgaaaaaaaaaatgaatgtgtcaaatattactccctccatttcatagtataagttattttgattttttttcttaagttaaatttttttaagtttgaccagtttatagaaaaatgtaatagttttttaagaaaaaacaaacatttcattaaaacataattcatgttagattaaataaaactaatcagtgctttaaatattgctaaatctatctataaacttaatcaaacttaacaaagtttgaccagaaaaaaataaaacgaccaatagtataaaatggaagaagtagaaagttaataggtcgattttaaaggttctttttcatagcgtataaagttctctagctaagaactgatgaggatttttttaaaaaaaacataccgtttagaagtatggaaatcatatctatgataataataaaggagtagttatatttatggcgtcatattttttactgaaaaataattgataggctagagcagtacctaaatttgatggggactgaattgagttactgctagtacgtcctgactcatcaacatctcatagctagtagctaataaggattccggccaattggttcaaggtgtgacgagcggttgatgcaaggcgtagagtaaacgtgatactccctccgtagaaaattatagagcatgtttatttggaaaaaggtatcattctttaactattcgttgtgcataagtatatttataatatttatggaaccaatgttttatgaaagctttttgaaagatgaatctgttggtataactttatgcactaaataaatatacctgtagctagtttggctaattgatcaaaatttacagagtttgactttatacatagcattgtgttccttgtgctgctaattaattaatgagtaaattcaataaaacttcatatattatagtctaaattacacaaaaccacaatggttttaacacgtggacaggaaataaatactataggtgccggttatatcatttccagcacctataatgccgacttgtacgtctttatatagtagtgcaagtatatattatggtcgtaaagttttacaaactacactatcaacaattttgactttgatttaccatgcatacattttttttctacaatcacatgttaaatttataagttttttatctatcatataagtgttgcatctgctttttaaatttggatacatggtgtatgtctaaatattaattgaaggtcaacctataatactcagagttatatgccatatgtttgtgtaacttagattataatgtgcaaggttttatgaaattgacttttaattagtcttctactaatgttgagtaagcagctagcctttttcctcttcattaagcaagccactatataggtaaccaattcgtgcttttgctggccttctgtctatgttactccaataaagtttggtagcgccgccgaccagagcagctggctaataaaattaaagaataacaatatatcatgcatatatatattagtagtagcatattagaacttgcaaattgcaatagattgaaccaggattttggaagggatcgatatataaatatcgaagctagatccggacaaagcgcatgttatataattatattacacacgcatgttgctgagttgcacaagttaaccatgcattcttgtctctgcatatacacatacctgctaactgcaatatataataagccatagtatatacatacatcacatgaccgattctctgttggagatgcaaatcaaaacatgcctgacatttgccatggtataatggtgtgcatgttataatttggcaaggcattgaaactctcattcaggtagtatgtgtacatgaacagcatgcagagaagaaatttaatatatattaattagtataattattatacagatttcacagctgagtttgatcgatgcatgaactgtgtatatctgtcacggtagtgtgatgaaatatatggtgggggcatccaaagccagcccacatgtcagccagctgtagatccatcgatgctatgatgcatatatatggactatatatactcgctcgaattaattatgcgttacttatttttctctgcgcgtttaatcaaacactattaattagtacagtattaaactagctagctagcttagacagcgtcacctccatccatggtggggtagctgcgtacatgtgctcctgctttagctagctcaaactagtgcatctatcaacacaacactaatcatagcatgccgtcgacgccgcatttaattatagaaaggactgcctaaccggccatctcttgacagaaataaataccctaaaatcatgtgaattctaaaccgttagatcactatagatctgtacagctatattcttctctctcttcaccgctaactctgtttgagtgcacgctattttcgacattgagcttctcaatcctctaagatagatccatctgtcaccgcttcgcaggcgccaaaaaagcctactagatcaacctcctctcctcctccgtgagcggggtgtcaccccgttgtcttcctcgtctccaacagctcctacatcgtcacccgcctaataactgattaggatctctcacccccactgtcagccctatctgtcaccctgccactaatccgtggcttagatggtgtggacgttgcctcgtcaccctcccgctctgcagccaccaaacattccctctaaccctagcgaactttcctagctagcccccttagaccataaaccctaactgatcgatccaccgctagttactgtagtgggagaatcgaggagccaccgctagaaatcccccctccgccttccaatacttacggaatgaattaggttagcaactatgaatcacaataagttagagcacgtacttatttttatttataataatgaagtagcgggttttcccgcgtaatttaaaattacgcgctaaattctaaaattaaaaacgatatttgacatataacaatgatttctatttctacaaatatgactagctagcgtttatatacaactataccgacaaaacatctaacattaacttgtatttctaacaaaacaagaaaaaacaccatgaaatttctatgtggcccgggcagtgaagcatgcagtgtgtgacgcgggactccggtgagataggcgaggaatctcctctcgtaagattcacctactcttctctcgtcaaattaacagcctatcgatgatcgattaacggaggctggcaactgggccaaataggcgaaacaaccaatgggcccgcgccacgtgcatccagcatcaatccaccacataataataataactaaataaaataaacaaataaattagtgatggatccgaactctaatactagtattagcaatacaagaaatagaaatagcaattggatcggaggcactataaatacatcctccgacccctcgccaatcccgcacacaacgcaaacgcaaactaatctcctcttctcctctcctccctttttctttcttgtgctaatattatatccatctcgcggcgacgcgacgatcatggagacccgggacgacgtcgccgacgcctcggcgcttccctactcctactcgccgctccccgccggggacgccgcctccgccgacctcgccgccgcccgccgttcccggaggcgcccgctctgcgtcgccctgttcctcgcctccgccgcggtgatcctcgccgtggcggtcctctccggcgtcaggctcgccgggcgccccgcgacgacgacgatggtcgtcccgggggtggtggagatggagatggcgagcagggggccggagtccggcgtgtcggagaagacgtcgggggcggaggagatggtgaggctgatgggcggcgcggcgggtggggaggcgttcccgtggagcaacgcgatgctgcaatggcagcgcaccggattccatttccagcccgagaggaactggatgaacgatcccaacggtacttaatttctttgcattttttttcttttattttccttcttcgatcgatcgattgattgttctcatctcaattcgttcattccttccgctctgttcgttcgttcttctagatctgacaacattcaaatgctattaaataaattcccattttggaggaacgttttatggttaagattcttccagccccattttcctttttttttatttatttttgagaaaagatttaaaaataaaaaaggaaaaccgagatacccttaagattccaaccgcaccaaccgaccaggcattgtagaattcgaattacaataatttttagatagataaaattcaaattacattatataatcaaattaacattggaaatgcaatgcaggtccggtgtactacaagggttggtaccacctgttctaccagtacaacccggatggggcggtgtggggcaacaagatcgcgtgggggcacgcggtgtcccgcgacctcgtccactggcgccacctccccctcgccatggttcccgaccagtggtacgacgtcaacggcgtctggaccggctccgccaccaccctccccgacggccgcctcgccatgctctacaccggctccaccaacgcctccgtccaggtccagtgcctcgccgtcccctccgaccccgacgaccccctcctcaccaactggaccaagtaccacgccaaccccgtcctctaccctccccgcaccatcggcgaccgcgacttccgcgaccccaccaccgcctggcgcgacccctccgacggcgactggcggatcgtcatcggctccaaggacgagcaccacgccggcatcgccgtcgtctaccgcaccgccgacttcgtcacctacgacctcctcccgggcctcctccaccgcgtcgaggccacggggatgtgggagtgcatcgacttctacccggtggccggcggcgagggggtggacatgacggaggcgatgtacgcgaggaacaagggggtggtgcacgtgatgaaggcgagcatggacgacgatcgccatgactactacgcgctggggaggtacgacccggcgaggaacgcgtggacgccgctggacgccgccgccgacgtcggcatcggcctccgctacgactggggcaagttctatgcctccaagaccttctacgatccggccaagcgccgccgcgtcctctggggttgggtcggcgagaccgactccgagcgcgccgacgtcgccaagggttgggcttccctccaggtacaccttcattacctctctaaactattttaagtttaactaagttcatggacaaacatatattaaattagtttcatcaaatcaataattaaatatatttttataatatatttgttttgggtgaaaattttactacttttttctataaacttagttaaatttaaagcaggaatttgactaaaattaaaaacaacttataactcgaaacggagggagggagtatatattaattaatccagctactactagtaattagctagcatgcatgattagctaggcatcattggcatgcatatgtgcacttttactgggctccattgacacgttggatcgacgaacaacacgtacatatgcatatgcctgccggagtgtagcgtagcaatcaaataatggcagccacttgtgaagagcgagagagatgacgcgaacaaacaaaaagcttgtcatgttggttgtcaaaatgtcgcttagcttcatccaggaatgaatgcggatatcctgttggggccccactgctcagctaccgaccggagcaactgttgagatacccttttttgcaataattgacataataaacagatcgtattattattggttgatggatggaattgcttgtgtccaagctatagtcctcctagcaactgttactactagtaggaatagctgtccttgcccataactcatgtgcaaccatgtgctgtagctgcattctgcttgtctttgctgatgctttgcctaactgaaatcatttgcacacacaacttaactgggattcatagattgcaaccttttcttttcaccagaaaaagggctgtcttttttgcttgcttttcaatataattccaccgctctcattttctttgctgtcacagtactgatagataatgcaaaatcgcttggttcatgtgaagcaagctatagtaataataattatgattaacatgtgtaattaaattactggagtagtagctaattagtaaaaataaaaaaattggcatgcagtcgattcctcggacggtggagctggacaccaagacggggagcaacctgctgcaatggccggtggaggaggtggagacgctgcgcaccaactccaccgacttcggcggcatcaccgtcgactacgcctccgtcttcccgctcaacctccaccgcgccacgcagctcgacatcctcgccgagttccagctcgacccgctcgccgtcgacgccgtcctcgaggccgacgtcggctacaactgcagcaccagcggcggcgcggccggccggggcgccctgggccccttcgggctgctggtgctcgccgacaagcgccaccgcggggatggggagcagaccgccgtgtacttctacgtggccaaggggagcgacggcggcgtcacgacgcacttctgccaggacgagtcgaggtcgtcgcacgccgacgacatcgtcaagagggtcgtcggcaacgtcgtcccggtgctcgacggcgagaccttctccctccgggtgctcgtcgaccactccatcgtcgagagcttcgcgcagggggggaggtccacggcgacgtcgcgggtgtaccccacggaggccatctacgccaacgccggcgtcttcctcttcaacaacgccaccagcgcgcgcgtcacggccaagaagctcgtcgtccacgagatggactcctcctacaaccaagcctacatggcctagactcctctcttcttcttcttcttcttcttctccattattacattattgctgcttacttgtaaatcatttttgacgccgccgcctgctgctagctgctggcctggccttcagaattttatctctttgcttctttttttttttgtctctgctttaattttgtatctcgatcgatctcgaccgatcgattaattactatatctccatgaagaaatgcatggatgatggatcatggatggatcgctcccttcgatccaactgtacctaggggaagaagatgccatggtcaagcaatacttctgtaaatgtttcacatgagtcaagatttatgcagagttataatatatatgtttctctctccctccctctttgcaaacaaaaagtatccaaatgaagaatcctctcttaatttgcaccaagatagagacacgcacaaaaagagtttcgcggcccgtgatagactgatgcttcttacatcttgctggcctgggttgtttgcctttttctttttccctgatttctttatatttgttttcagcccgcaaaaagaaatacagaaatgcacatgcttattattctcacatggatgcaaagcctgggacgtggcaaatgtagcacagtacatgcttatacagctacaaacaatacatgcatagatcagatttttgtcttctgctttatgttttttctacaccgtgttgagtttaatatatcatgttcttgacgagccaaaatacaaacaaactgccgctggaactgttaaatgccaaaagctgctatttgcagcatattaagggaactggggaggcagctagctagattggttagcagctcagcatgagtatcatcagtagtatctcagagaaatacatttcaatgcactgtggacacataccttcattgaacaacagctcagcctgacactgcgcatgctcacaaagggaataagggaaagtcaaattgcaacttcataaccgattttgaattaaacccattgaacacgctcatcattcgtgcatcctttctttcattttctgtaaggatcagatgatgaccaaattagatgagaaccaactgtaagattttttttttcgaggggaaggtcaggagttctgccgatttcaattaagtagggggaaaacaaagttttacaacatgcaaagtccagggtttggggatcccttggatacaactgtaactgtaagaatttccagctgcaattagtttttcttaaagaatcagatgacaaagaaatcagatgaaagcacctcatcagagacgtacaaacattatcaggtagcactttctgacaacagaacaaagcatggattaattccctgccaagactggtgccgagtaatttccagatatcatcgagccattggaaggagtcaaaccaatagtaacactgcagatgttagatcaatgatttgaatcactttgttagctgaagcacactgttctcattggcatcttcgttcaacaaactcaaggaagatctcaaattcataagtggagagcctgttcaatcggataaccacatatatcctgcgcatttttacaattcgtaaccaacctcaaatgttcatatagatatatcaatgatttgcactaagaaacgaaaaatgatcagcttatcagtactttgcatctgctgtcaagatcaatatgcaagccccacaggaactactgcaaccactgggaataaatgaaatttgaaactggtccacttgaatcgcaatcacttatctgaccatatcagagtgtggtgtgttcataactacacatggcccatttgccttttttaaaaaaatgcacgcacataatatacattctaaatgagtttttgcagttccaatttcaatcaagattgcctgaactggaatattctaaagaggcataggcagcaaaaaggtaggcagcatgttgctcacaaaaataatgatgaaacgaaaacaattcattgaatttaagtagccaacgattcttttacttctatcatggagcagccgtttagcggaacaaggccagagacagagatgtaccaagccctctggagagtcgcagctttcaaccagagaaatgctctttaccatccaccggtgatccaaagaaaagataacacatatcctgggttatcaccacttcaccataaaaatgaaggatttgggactagcaccatggtctcaaaaaaaagagagagaggctatttctgacaaggtcacttcacaagtcacaagatatcttcatctcaatggtgtatgttcttgtcctctctggcattttatgagatattgtacttattttcaattgcgtgatcttactgtcatataactgcattgtgactttgtgaggtggttcagcacaaatttccatctttatatcaagaagacatgaccgccaacacaaactgctataaagcaaaagggtagtgctgcatctgcatgtcaatgtgtccagttttctaggcagtacacgaatttttcaattatttggtttgccattctccttcgtctctctctcagcagggatttgaacatgaggcagcgaccaccatacttttcttcatgtcaaattaatgctagaaaatgtggattggcacttctgctgtgctgtcaaaacttgcctcccaaccaggcaaccaccatgtaactaatttaacaaaggctaatcagaactaccttcctgaaacacagaattatgatttcataaacacacctcttttcaaccctgcacctgcagggaacatgagaattcttactttcaggtgcagactttcaggaaagccaaagaatctgatctaaatttgaccttgattaacccttttcctttcttcaagtaggctgaaaactctggttcatatttcatactagaagaatgtgggggtgtaagctggattgacaggatgattaccagaagtctccgcaagagcacgtgccattgttaaacttgtgaaatctgacagcatccctcacaagaatatcacggcaaatctggaacgctaggaacgatttgaatttcaaatccaaaaaattgggaacctctgcaggtatgccatgcagctcaggcaatgatttatgcatatgagaaagaagcaactttggaagaaacaggtaatactgccaacaaggaacaacagcaagtagaagtcacaaacttatctcccatccctgcaggtatatttggtgctacgttgattgatttgtgtgtggataacaaaacaggaattgatctttttgtacatgatccagttatcccaggctgccatctggctaaaagctattagtgtgaattctacttccccttgcaggctgagcttacagatctctgggtagccttaaaaatctgcagtcttctcagcttggtgaatgtgatcttctcactgataacacaacaattgctactatcttcaagcaaaataattttcaggagaatctatgatattggagcttgaggccgctcctatcaaaatttcaacaaaatttgcaggatcagcaattgcaggtcaaatggattcctacaagggcaaatgaagttgctgataaacttgcaaatgaggcaagaaggataagttgttatagggctagaactttcagtttttgtcacaatagttctcatgtttgctatcaatctagatgcccaaatacaagtgcccttgtaaacctctgtcttgaagagcaaaacataatgcatgtattataatagaagtcatgaattctaaagaaagagaagacttaaggttgttggctcaaataagaattgccaagatgttaaaagaccaattgccaagatgtctatttgagaccatactcatggccacatgtagtgcgcaagttgcataagttcatcaaaacggcgtagcaataaaatttaatgacggttctagtgtcctgtggtttttcagaagataataaataacaaaaaagggcttatgcttaaaaagcagccaatttacttggaaactaaagtttctaagattcgttttttagggaaatcatccaagaaagcatattagtttattgcaaaggaaagcatattagtgacagcagtaaatagctatatctttatgtatttctgcagaaatcaatgcccaaggtcatatgaaagaaatcagcatataaatgacaaaattgatattgataggtgctggaagcctcaaattactttatcccgttggtgcttctatacaatatgatcctaccataaaagcaaaaaaataaaataaaaaataacagcttgagacctactcttttcattgagtagtaacactatttttttatctcatgggtggtgtgattaagcttatggataagaaattaataagacattgacataaatgtagcacctgagtacctaacaataatttaaaactaaaaaagaagaaatatatgcactaaccgcaattgtgtgtaccaactattttgcatccatgtacatatgcggttgagtttttctagaattcgactacctaggctgctgctgcgagtgtggtgtatcgatcataatttgcaggttttagtccttgcagcctagccaatgtctttgagtatggatagcgacctccttgaactcctccctcgaaagccttctttgaagggtgagatacacaagattaccctgagataaaaaacttgttcagtaaattagcaaatatatcatgaggcaggtgtgtgtggatagacaataaaggtacagtatatttagtactattcagatacatggaaccagtcataatgcagtccttaatatttgtcgtaaatatctgactgattctgacataaacactgtcaagcaaagaagcatatggattcaaagcctctttttttttgcaaaataattcaaaatgatatcaaccggttttgctaggcaaatctgagttgagtaggatttcaaggaacatgtcctctttgagcaattttatagccaatttagtaaaaagctctcatcttatttacatttttaagaggatatttctatgacaggcattacattggatcatagaaggaatcaacgagatgctgacctttcttctcaggaggtgatacttcccttttaccagtgacattttctgctttatgaactacagagtgagctaggaaatgcagcagtagcttccctccctacttcatctactgactgcactaacggatccaagcaagaaaaaaattcttccttggagatattatgatctatatacttggattgaactgaagaaatttacagaaaaatgtcagtgcaaaaaaacaacacacagaaaaactcaattagagaatggatatcagctattgagcttgcaaagtgagaggacctggatggctcaaagccaatggctctgaccggaggagctcgcagcgatcccttctcccatttcaggaaagccaaagaatttgatctaaatttgaccttgattaacccttttcctttcttcaagtaggctgaaaactctggttcgtatttcgtactagaagaatgtgggctgtcagctggattgacaggatgactaccagaagtctccgcacgagcacgtgccatcactaaacttgtgaaatctgacagcatccctcacaagaatatcacggccagttatcttagaaatgaacttggtagcattgtgacaatccacacatacccgtagattcttgacaatccgaattggcatttcttgtggaacaaagattaagccaaaggcaattgctagcttctcgctgtgatggctaatcatgtgaaccttatcagcatctgccacatcatgcagcaccgagctgacatcaggcttgtatccttcttcagccatctttgagttgagccactctagcttttcgtatattctactggagaaggggtgggattggtcatcggctgaaaatatgtgaactttgttcttgtacttgatccaactgcagcctggttccttcttcacctgcctgtccctcattccacgtctaagatgagcgacttcagtccattgacctttagcagcatgcatgctacacaacaacacatagctggcagggttttgtgggtcagtttccaagagattctcagctgcccacttgccaatctccatgttcccacgcagcctacacgagctcagcaatgttgcccatccaaaggcatcaggactgtgtggcatctgctttatgaattcctcagcctctttgaacctccctgatctactgtacaagtcaatcatacaagtgtagtgatcatctataggaacaataccgtggtccttctgcatggaatcaaagtagtcgcaccctttctctacaagtcctgcacggctacaagcagaaaggacaccgataaatgttaccccatcaggcttcaagccatttgccaacatcttctcaaacaaatctatagtttcttttgccttcccaaattgagcataccctgtcacaagagcagtccaggagacttgatcgtggaaggacatctcatcaaataagcggtgtgcatcctcaatgctgccacacttcccatacaaggtaactagtgcattggacactgtaatgtaccgcatcaaccctgagacaagtgctaggcagtggaactgtgcaccctcttccagacttgctaaattagcacaagaacttataacactgcctagagtgaaatcatcaggcttaatgccatccatttgcatctctgagaatgcccggacagcctcctcactgcaagcattctgtccatatccaacaatcatcgcagtccacgatatgatgtttctgcatgtcatcctcctgaaaacagcctctgccaatctgatgctcctgcacttggagtacatgtcaacaagcgcactcccgacaaagacattatcttcataccaagtccgagttatgtaggcatgtatctgcttcccttcttccaaggcagcaagggcaccgcaggctgtaagaatgcttccgaaagtgtactgatcaatgccaacaccctctgccctcattctcctgaaaacatcaagagcctccaactgcaaaccgttctgagtcagtcctgtaaccatcgtagtccaagtaatggaatccctgtccaccatcagctgaaacaaaccctttgcatcctcgatcatcttgcagcggagcagccctgtgatcaaggtattgtacatgaccacagtcttggcctccatttcttgaaacacccgcctggcatccctaatgaggcccatcttggcatacatatcgaccaacgggctcccaacgaaagcatatgccccgaacccaagccgcagtacctggcaatgcaccgagtggccaagcgcgcggtcggagagagccgaagcgaccatgatcatcgccgacagagtaatccgggttggcctgacgctctcctcccggagcagcgcgcggtacagctggaccgaccgggcaggagagccggtgctggagaagccggtgatgagcgcgttgtaggagacggcgtcccgctcgggcatcgaggcgaagaggcgctccatgtccgggacgagccttgagtgggcgagcgccgagaggagggcgttgcgggtgaagaggttggggtcgggcatttcgtcgaacacgcggcgggctcgggcgaggcggccggacttggcgtaggcggtgaggaggtggttgaggaggaaggttgggggagcctggagaaacgtcttgagaatgaggcagtgcacagcgccggccacgcgaaccccggtccggccgccgtcgccggcggcggaggagaggatggcggcgtagcggttgcatagcgcgtgggcggcgtgggtcatcgcgcgtgggctttcgcttactagactagaagtgcccgcgcggttagcagataagttttcgatcgttcgttttattaaaaacttttataaaataggtaaaactacatgtatacataaaaatatatttaacaataaattaaatgatatgaaaataattaataattacttaaattattttaataagacgaacggtcaaatattttttttaaaaaaaaagtcaatagcatcgaacgttttaggatggagggagtactattaaaggccttcacatcaataaataaaagttgggattgtacttgacagtagttaacaattcgggaaagcacaagaatgcatatgcaaacaagcatcaaattgggcaaacatctttgtgacacacaaacataaaataaacaacctggccactagcaaattgacacgacactaaatcaagaggagggaaaaatttcaaaaaaacagggaaaaaggaaccgtaccgatcttggggaattttatgattcgcgagcttcccctgcaagtactatggagaattttttttatttataatttttttattaaaagttttacaaaaataattttccattttgaaaattgacggaagtagtcgcctaccgccctctgggaaaaatcgccctctcagagggcggcgaaaatgacgtggcagacggccgttcgctctcgggcgacggccgtcaacgaaatttgcaggcggcccccttgccgccctccgctagggcgattttatactgtgcggggggccgcctgcaaatgggcggcgagggggggcatggaattttgcaggcggcccccttgccgccctccgctagggcgattttgtactgtggggggggccgcctgcaaatgggcggcgagggggcatggaattttgcaggcggcccccttgccgccctgggggagggcgatttttgcctctccccctataaagcccagtccctcctctgtgaaatttcattatattcactaaaaatccaaaaaaaacgaaagagagagaggggagggcagcagaaggggagcggcgaagccctgctggttcgctcaattcatcacaggtatgctcccatacatcttttgcatttgtactaatatgttatgtttgagtatataagttgcgttttagttttagttccatatattttagcacatctgtagcacacagcacatatgtgtagatccagagcatagaatataatagtatgaattgagacatagacagtagtgttaattgtaagatgtagtttagtttgatctggagaatgtatcgtaattttagaaatttagagaacaatattgtagagaatgtaacttagggcgtagtacagaaatgcgaggttaacgcagttattgttttcatcaggcacaatgtcaagtaaggtcacatttcagatagttcacggtgaaggaaatattagatttggtccagatggtgttgatctgtcagattttgtaatgacatctaagggcatcgataggcctgcggagagaacatttcagtcaatttatagttggttgttgagaggatttagaatagaccaagaagtctacacaatgtcagtgtcagttgtagtgagtcgtgcaacagaaggttatttttgggaactaatgccgatggacagcactgatgcttggagacggtatgtggaaatggcttttgaacggtcatggcccctcgttatatttgtgtcggtacaagagaaagatataaatgtttcaatgcaaaccgaagatgtagagggtcctatcaatgcaggggatgttgttggaccatcgatgcaaaatgaggaaaatcaaccaagggaggagcaggctatgggcatggcggatgagggggagagagtcggtataattgttgatgaaatggagagggaagattcggataatgaggaagcggacgacgacgcatcatccgatgaggaaggtgatgtaatggccactgattgggcaaatgaggacttctctggacttgttatatcagagggtgatcatgtaccctgggagtataaggagaacgaggtaattgagggtgcaaggtatgctcataaggatgagatgaaggaggcggtgaagcattgggcagtttccttgcagagagagtttagggtggtcaagtcaacaaattatgtgtatgaagtgaggtgcatgaaggaagattgtccgtggcgtgtccatgcatataagggtaaatggaatgattattggaaagttagcattgtgaccgagcacaagtgctacttacaaggggtggagaagtatcaccgaaacatcacttcagcttctgtggcaagtgagatgtacagcagtgttgttggtaacattggctttgaaccaaaatcaattattaggcacatcgagaacaaattcaagtacaccataagctatgcaaaggcctggagagccaaacaaaagatcattgagatgaggtatggcacatttgaagcttcttatgataatttgcctcgtttgttagccaccattgcccagaggaataataatacgtactatgacctacatacatttacatcggttgatgatcgaacaaagagtgtgctgcaaagagcctttttctcattgggtgcttgcatcaatgcttttgtgcattgtcgacctgttctatgcatagatggaacttttatgacaggtaaataccgagatcagatattgacagcaattgggtgtgatgggaacaaccaggttctacctatggcttttgcatttgtagagagtgagaacactgaaagctggtactggttcctagagagagtgcacattgcagtggtgcgtatgaggctcaacgtttgccttatacatgatcgtcatgcgggtatgttgcgggctattgactacttgcagaacggttgggatgagaagggacttccagctaagtggcctgatgttcggagtcggtggtgcatgcgtcacatgggtgcaaatttctacaagcaattcaagaacaagcatcttatggagctctttaagaggctctgtgcacagaaccaagagaagaaatttaatgagttgtgggacaagttagatgagttgacaacgaagcaaacagatgagcaatctcgcagaccactagttgaaggtgacgagcctcccatacctcttggtgcattacatgatgacccaccaacaatgagaaggaggtcagggtcgtccatcagaaatttcactcagtggattgagaatgagcctaaggagaagtggtctctattgttcgacaccgatggatctcggtatggcataatgacaaccaatttggcagaggtgtacaactgggtaatgcgaggagttcgggtacttccattggttgctattgttgaattcatccttcacggcacgcaagcgtactttagggatcgatacaagaaaattggtccgtccatggccgataacaacatagtgtttggcaatgtagtgacaaagtacatggaagataaaatcaaaaaggcacggagacatcgagttgttgctcaaggcacacaagtgcatcggtatgaaataatgtgtgttgataggagcaggcgtggtatctatcgcaagcaagccgtgcaggaatgtgtcttgaaggcggatggtggatgtacctgcagttgtatgaagccgaagcttcatcaccttccttgctcacacgttcttgctgctgccggtgattgtggcatatctcccaatgtgtacgtctcaaattatttcaggaaagaagcaatctttcatacatggagtgaggagatatatgggttcgggatctcaggatcttacacaacgctgagtgcccaagttttttatattccagatccatctaagttaagggtgaaaaagggtcgacgccaaactagacgcatcagaaatgatatggatgagtcagaagcaggtgggaggactttacgctgcagcaagtgtgatctgcgcggccatacttacaagaaatgcccgaagaatgcagaagttccaagcggcgcagatgctagtccatctggacaggcaagtgatggtaggcgaccacctggtgaaggaacaacaagcaggcgcgcaaggccaaggcgtcgtcgcgcagcaggcgattccatggtgtaacaatgctttcgatttaggaaataaaatgctgttgtgatgtaatgagtgttcagactaaatacttctatcgtgtaatttcaattcaatgttgttgtaatgagtacctccgactattgttgtactagtagtattgcgaactattcggtgttgtatcataatgttatcgtgatgagtgttcggactaaacacttttgtttgtttgtactcttgtttaatatgtgttagtaattcgcttatgaacatttattacttatgttgaactaattatttatatgtttctgatcaacctatttgatgcaggtatggcgtacgacacaccggcgctgttgaaccgtgggattgacaggaaccaccgctcgttcctgtcagcagtcgagggtgcacagctcggcaccttccgtccacgcacgtcgcgcgagtggttgcgtgtcgacccccgtcacgttccttggtacgcgtatgttcacatttcaactcaactttgctttgtgttgtacttatgtttgaagtttgctctatacaggttgcgtgcggcaggccttctaccactttgtaggcttgttgaggcggcggcggacgaccgtgacccagcgaagcggtgggatgcagaccggtcactccttgccgctcttgtagaccgctggagacctgagacgcacacgttccaccttccctgtggggagatggctccgacactgcaggacgtgtcgtacctgctcgggctaccgctggcgggagcagcagttggtcccgtggacggtgtttttgggtggaaggaggatatcactgcgcgcttcgagcaggtgatgcgccttccacacctaggaccgaccaccaccattcctccgtactctacagtcgggcctagcaaggcttggttgctccagttcactgtaagtaaataagttgttattatcatacgtgcttatttgcgaccgaatgagtgttttgtactaacatttcattcttaattgtaggcggaccttctgcaccctgacgctgatgattactcggtccgacgctcccttgaggcgtacctgttgtggttgttcgggtgggtgatgttcactaacacccacgggcacgctgtggacttccggctggtccactacgcacggtccatcacggatgctcagccacaggacgtgccgcagtggagctggggttctgccgtgctagcagccacgtaccgtgccctctgtgaggcgtgcacgaagactgatgtcacgcccagaaattcccgaatagaattccaagcagaatgtgtattaaaacccccgtccaggaccagccggggtacacaaacgacaatgttgacatacagatccacgtcttacaaacattataaaagtcttacagagatgcagcggaaaacaaaagaaactggagctaagccttgacttgaacggcagcgggaacaccactccacaggcatcctcgacggcacggacgaagcctactcctcggagaacccgccatcggacacatactcgagctctgaggttggggggaaaagtagagcaagactgagtactacccactgtactcagcaagtcataccggaataggggtatgatgcatggatttaacaagggatagctaagcaggttcatttgcataaatactggcatttataaacaggaatttaatgcaaaaacagttgtaaaaaaaattaaacagtattaaacatccgctgtccaacgctaacccacgttgcgacaggcccaaccatccacctaaactatccaagttcaacagattacactagggtgagactaatcacggtgaatctggttgaccgcccataaccgcgggcacggctattcgaatagttttactctgatcagaggtgtacaactgtacccacaagacacagccccacgacacgtttccgtgcgccgacatgtcaccacgacataccggaaagaggccgtgacaggacccttcgcataaccccctctaaccaagcacaccacacctcaggtttcacccccactcctcgcaaggcagcgggcagtcccctctcgtgcctaggtgaatccggaagccgcatagaccgtcgcagggcccatccaaactccatcacgcccacccttgcctggatgcgtcggctagaggaaagctacactacaagcccagccgttgcccacgctggcttgtggtaagtacgataaattcttccagggcatcccgcgaaccggtccttaactgccatgggtgcgactagcaaaaccatgcacccacagcccaccatgtggttcactttatttaaccaacaccagcaacattatcatataaacctatagtctaggttttaaatgagatccccaatgtgtgctagttgaactaagcatggctaagcaattcctagtccaaagtctaatcatgttataacccaagctaacaaaggagcatgatatccaaaagcatggctgtaacaataggtatccatcccatagtgatattataaaacaatgcaatatttgaaagaaaacaatagagcatttgcaatataggatcaacatgttcaagtgacaagcatgacttgccttgctctgctgctgggggaacctcggcgactatctcgaagtacaccggagcgtcgaaggaaccggaatctagcgacatacaaagcaatcattgcaaacaggctataagactactgaaacagagaacaaaaccatttttaatggattctacacatttttcttgatttactgagacttgaatgggcttaaacggagctcggatgaattagttatgaattttagaagattcactgtgtttaatactataaaagaaatccttaaataatttattgcgcaatattaaccagggctgacgtcagcgaggggggggggtgcggcgccgacatgcgggacccaccggtcagcggcatgggagagagaggaaggggggtggcggcgcgcgggcccaccggtcagcgacccggggaaaaggaggggcggcggcgccacgtggcggccgaaccgacggccccgatctacccaagggtagatcggacggcggcgcgggacctcgcggccggggcgcgcgggcgcggcgcgagacggcggcgaccatggcgccggcggcgcggcgctcacacggcggcggcgcgcatgcggcagcggcgcaaagcgacgaccgacggcgatcgtccggcggcggagagcggcggctagcggctctaggaggagaggaaggggaaaaggagggaggggatgcctcaccgagggtggccggcgcggaggaaggcgatggcggacggcgacggcaagccacgggaggacggcgtcggctagcggacgagctccggcgtgccctaaggaaggagaagagaggaattagagagagagagatggaccatggcgatcgggatccatggccgaaggcggcggtagaggtggcgctcacccgtgcgcgtggagatgagggctccggcgacgaacctcgacggaggaggggcggacgaggtggacctcggccacgcgaagctaacggcggcgacggcgtgagacggcggcgagcctagcggcggctagcggcggccggagtagcaaaagcggcggcggcgggtggttgcacggcgcggaggcgttggggagctcgggagaggtcggcgcaatggggaaaaagcgagagggggtgccggtgatgcttaaataggggatggggaaaccggacgtggccgggagcggcgggattcgacggccgacgtgggggagtggggaggagagagaggcgggattcggttttcgaatcccggccatctcgggcgcggcgcgagcgggagagggaggggaacgggcgcggagaaggcggcgcacgcgcgggcgtggtcgacgtggcccgggagagacggaggcgtgggcgcggcgtcggttgcggcggtggcggcgcgagcgggatcggcgggaggagggagacgggtccgacaggtgggccccacctgtcggcgaccccgagaggagggaggcgggcggccggctgtcgggctgggcctcggcctgcggccggcccagtaagggaggggaaggaagggagaagtgggccgacggcccacttgacaaaaaggagggaaaagagaggaaaaagaaaaagaaaaggaaaaaggattttccctggaattaacaattgtactttagtgatttttaattggttaaaattatttctagagctctgaaaattccactaaaaatcctgttaatgaatttcgacatgtagaattcaagaaaaattccacatgtcaaatccgattattatttgcattactttcttagggttttctcctgatttcaccagcattttcttagggtcaattataaattacaattttgactagggaggaaaacttcggggtgtgacaaacctaccccccttaaacggaatctcggccccgagattcggtggagctggtgaagaggtacggatgggcggccttcaactcatcttccctttcccaggttgcttcctcttctgaatgatgactccactgaacacggcaaaacctggtgaccttgtttctggttctcctttcgctagtgtcaagtatgcgaaccggcttctccacatatgttaggtcctcttggatatcaatgtgttccgaattagcctgttcttcaggtacccttaaacacttctttaattgggacacatggaacacgtcatggatgccgatcatagtggatggaagttctagctgataggcaacttctccccttcgttccaaaattttgtacggtcccacgaagcgtggtgccaacttgccttttgtctgaaagcggtgtactccccggagcggggtgacacgaaggtacacgtaatctccggcctcaaaagttagctcccttcgacggttatccgcgtagctcttctgtcgagactgagcaatcctcaatctctccctgatgattctgactttctcttctgcttccgctaatacttctgttccgaacagctgacgttcgcctgtctgatcccagaagagaggtgtgcggcacttccggccgtatagagcttcaaacggtgccatctgtagactggcctggtagctgttgttatacgagaattccgcatatggtaagcttttgtcccaagctccaccaaaatcaagagcgcaagctctcaacatatcttccaagatttgattgactcactctgtctgaccatcagtttgcgggtgataggccgtgctgaaatttaaacgggtccccatttcttcctgcagcttctgccagaactttgaggtgaactgactacctcggtcggatactatcttcttgggtaccccatgcaaacacatgatccttgcgaggtacaattctgccaatctctttcccgtataggtggtatgtactggtataaagtgagccaccttggtaagtcgatccacgactacccagattgaatcatgtcccgatgatgtccggggcagtcctgttataaagtccattccaatctcctcccatttccattccgggatttgaagaggttggagtaaacctgctggtctttggtgctctgctttcactcgttggcaaacatcgcagagtgcgacgaattcagctatttctctcctcatgctgacccaccaaaatttttctttaaggtcttggtacattttggtgctgcctgggtgaatggagtactgggtctgatgagcttcggtgagtatcagatccttcaattccttgtcgtccggtacacacaatctttctcccatccagattgtgccatgctcatcctcgtggaaatcccgagcttttccgactctcatgttctttttcagttctgctatttccggatcatttacttgagcggctctaacttgatccacgagcgtaggccgtgcctccagagcggctacgaacccgtgttcaacaattccaacgttgagatgttcaaactcctgccgcaattcctcacacatgccctcgatgcatagagcagtgcagtaacttttccggcttaaagcgtctgccaccacattggctttacccgggtggtagtgaatactcatgtcatagtctttgattagttccaaccatcttcgttgtcgaaggtttagatctggttgggtgaagatgtatttcagacttttatggtccgtatatacttcgcagcggttgccgatcagatagtgcctccagatcttcaaagcgtggaccactgctgccaattccaagtcatgagttggataatttccttcgtgtggacgcaactgccgcgaggcatatgcaaccactctgccctcttgcattaggacacatccaagtccgtgacgggatgcatcgcaatagacttggaagtctttcgtctggtcgggcaggatcaaaaccggtgcggatactaatttccttttgagctcctcaaagctcttgtcgcactcagctgtccatttaaacttctcgtctttcttaagcaactgagtcatgggtcgggcgattctggagaagttttcgatgaatcggcggtaataacctgccagtcctagaaaactccgaatctgcgacacggtctttggtggggtccattttgtaactgactccacgttcgatggatcaactgctacaccctgagctgtaatgacatgacccagaaatttgacttccgtcaaccagaagtcacacttgctgaacttggcgtatagctggtgctccttcaacttctcgagtaccagacggagatgttgttcatgttcctcttcggactttgaatagataagaatgtcgtcgatgaataccacaacaaacttgtccagaaattccatgaacactttgttcatcagattcatgaagaatgcgggtgcgttagtaagtccgaaagacataaccgtgcactcgtatagcccgtaccgagtggtgaaggccgtcttcggaatatcctcttcccggattctcaactggtggtaacctgatcgcaggtctatcttagaaaacactttagctcctttcagttgatcaaacaaatcgtcgatccgcggtaaaggatatttattcttgattgtgacctcgttaagtgcgcgataatcgacgcacatcctcttcgtcttatcctttttctccacaaaaatgaccggagcgccccaaggtgaagtgcttggtcgtatgtaccctttctgcagctgttcatcaacttgcttcttgacctccgctaattcgttggccgccattctgtacggtctcttatagattggagcggttcctggtgccaaatcaatccggaattcaatctccctcttgggtggcatggtggtgaggtcttcggggaacacctctggatactcgcagactatgggtatgtcctccaattttctcaagttcttctcttcggtgtccactgggatttccgtctcaatctgattcaacgaggctcctttctttggcgagactagagatttgtacaccacggtttctcctttctcattggtcagggtgactgtgcgattcgcacaatcgatgactcccttaaacttggtcagccaatccatcccaagaatgacatctaggtctttggattcgagaagaatgaggttggctagaaatggtgatctttggatttctattagcactgaagggctaaaactgactgaggttgaactatttcccggggtatgaaccctcattggtgtgctaagctcttctttccttaacccatacatccccacaaatttctttgaaatgaaagaatgcgttgcaccagaatcaaaaagtactgttgcagggattgagttaacagggaacgtacccagtacgacctctggtgctgcttgtgcctcctccgcagacgcgtggttgacacgagcctggataaaccttagcccggcacgcctgggcttcgggcatttgtcagcgaagtggccaagctcgccacagttgaagcaagaccctggttttgctcccgtctccttcttggcttgcgcgggctgggctgactgtgccggtgccattggtgggcgtggagctgcaccgcggttgggctggcctccctggtggttctgactgccgctagcgccctggtggaagttgctagagtggaacgggcggtgctgtcggacgatcatggtggtaggtccaccctgctgtccgggagtgaagcgcggtcggtgctgactaccttggttggatcggaactgcgccgcctttcttttcctgtccattttgttgcgctgatcctcctgacggattgccttgtcgaccagcctttcaaagtcagcgtagtccccggatatcagttggttggtcagctcgtcatccaggcctgccataaacttttcctgtttctcggcgtcagtgcggacatcctctggtgcatatcgcgcgaggcgattgaactcgtggaggtactctgtcactgtcctgttgccctgatggagcgcccggaattccctcttcttttgcgctacaaccccgtctggcacctgtgccttcctaaagctacggcagaactctgcccacgtaacttccgtacccggtgggcgggtggccatgtggttgtcccaccaagctgacgcaggaccctgaagctggtgtgtggcgaaagcgaccttctcctgatcattgcactgcaggagattcagcttcttctctatcgcatggagccagtcatttgcctccatagggttggtggtgctggagaaggtgggtggcctgacacgtagaaactcaggcaacttggactgagggggagggggaccaaactgctggtgctgctgttcggcgtgctgcatcatcctctgatgcatctgctggtgctgctgctgcatctgctgcatcatcgcggccatcatctgagtctgatgtgccataacttgggcaagcgtcggattctcgggaagtggtggcggaccattgccagaatcaccgttggggtgcacaccatcagcgcgttcttcaccgttgctgccctcgcctgttgcgcggctaccagtcctggtgtagaccatctggagggaagaacagacggggaaaagaagaaaaacagatgctcaagaactaagctttattatataggaattaaaactgcaattgttctgatctgaattaaaacacttaaaaaggcaagcaaaaatccttattaagacagccatatcatagacacatgatatcgaccgtcaactgaccccaaacaagcaacctaaacacacaaactaacaaacaaaaactagacagtcgatgaactagtggaaaaacgagcctaatgctcggaacggctcctgcggtcggtggagtcgaaagcgtcctcctgctcgtcacccggtccctctgagcgactcctggagcctgacggatcagtctcgccgctgccactgggagtagcagacagccatcctccggtaccactggctgaacctccggcggctgatgctggagcgaaggagagagtgaacgcgggagctggagctggagctgcaggaactgcgggcggagctggagctgctgcgggggccgctggtggaggtgggttcctgggcgccagctggatgcgcacaggtgtagtcgtcctcttacggggcgtagtgcggatccggactcctcctggcgctggaagacccttcaactgagcattctccttcttcaggcgcgctacctcgtccttcagagcgacgatcctcatgagcttcccatcattcaaggccttggtcgccttgtgcaggtccgagtgcatccggtccaatcccctcatcacagcacacatgtgaccgaaggtggtgtcgttctcgccagctgtcggacggaaggagctgacgccatcaccatgggctcgacgggggtggtagcggtacgccgtgtcgtggaagatgtagtcgtggcgctcccgtagtctggccatcatcaagtaggctgcctcctgacaggcgtgatctgctgtgcctccagatgcctcgaccgccatgttagcgaggcaagtccccacgtagccatggacctccaagcggacacggtgaggaagctcgccactgagcggcggaatggtcgtgtactccggcgcgtcggggtagcccactaccagtgtcatgcgtgccagctctgccacgaagtcgatcatgccttctccgcggtggttgggtgggtgaccggccatctagagaagacaaaggagtaggatcaatgtatgctcaaatccaaatttaaataaagcaataaagactcaaataaaggaatcaaataagagcaaaattttatgcatagatcattttacatgagcgcgaataaataagacagactcacataacgataaaataatgggaaattagatacataatagtagtaacaaacgaagcataaacaccttgcaacccatgataccgagctaggaccgaatgcatttcacccatcaaatcccaactgactgacgagtaaatcccaataattttactaaaaccctagactgactcgttttggaaaactcactttaaacgagcgaccaagatttttcccttgaaccacaagaacagatccccgttttcccggaacaaaatccaattgcaaagaacatatgcaatgaaaaggattcagagggctcttaggtctttccatttggcttgtcctacggtcaaggtcggctctgataccaacttgtcacgcccagaaattcccgaatagaattccaagcagaatgtgtattaaaacccccgtccaggaccagccggggtacacaaacgacaatgttgacatacagatccacgtcttacaaacattataaaagtcttacagagatgcagcggaaaacaaaagaaactggagctaagccttgacttgaacggcagcgggaacaccactccacaggcatcctcgacggcacggacgaagcctactcctcggagaacccgccatcggacacatactcgagctctgaggttggggggaaaagtagagcaagactgagtactacccactgtactcagcaagtcataccggaataggggtatgatgcatggatttaacaagggatagctaagcaggttcatttgcataaatactggcatttataaacaggaatttaatgcaaaaacagttgtaaaaaaaattaaacagtattaaacatccgctgtccaacgctaacccacgttgcgacaggcccaaccatccacctaaactatccaagttcaacagattacactagggtgagactaatcacggtgaatctggttgaccgcccataaccgcgggcacggctattcgaatagttttactctgatcagaggtgtacaactgtacccacaagacacagccccacgacacgtttccgtgcgccgacatgtcaccacgacataccggaaagaggccgtgacaggacccttcgcataaccccctctaaccaagcacaccacacctcaggtttcacccccactcctcgcaaggcagcgggcagtcccctctcgtgcctaggtgaatccggaagccgcatagaccgtcgcagggcccatccaaactccatcacgcccacccttgcctggatgcgtcggctagaggaaagctacactacaagcccagccgttgcccacgctggcttgtggtaagtacgataaattcttccagggcatcccgcgaaccggtccttaactgccatgggtgcgactagcaaaaccatgcacccacagcccaccatgtggttcactttatttaaccaacaccagcaacattatcatataaacctatagtctaggttttaaatgagatccccaatgtgtgctagttgaactaagcatggctaagcaattcctagtccaaagtctaatcatgttataacccaagctaacaaaggagcatgatatccaaaagcatggctgtaacaataggtatccatcccatagtgatattataaaacaatgcaatatttgaaagaaaacaatagagcatttgcaatataggatcaacatgttcaagtgacaagcatgacttgccttgctctgctgctgggggaacctcggcgactatcttgaagtacaccggagcgtcgaaggaaccggaatctagcgacatacaaagcaatcattgcaaacaggctataagactactgaaacagagaacaaaaccatttttaatggattctacacatttttcttgatttactgagacttgaatgggcttaaacggagctcggatgaattagttatgaattttagaagattcactgtgtttaatactataaaagaaatccttaaataatttattgcgcaatattaaccagggctgacgtcagcgagggggggggtgcggcgccgacatgcgggacccaccggtcagcggcatgggagagagaggaaggggggtggcggcgcgcgggcccaccggtcagcgacccggggaaaaggaggggcggcggcgccacgtggcggccgaaccgacggccccgatctacccaagggtagatcggacggcggcgcgggacctcgcggccggggcgcgcgggcgcggcgcgagacggcggcgaccatggcgccggcggcgcggcgctcacacggcggcggcgcgcatgcggcagcggcgcaaagcgacgaccgacggcgatcgtccggcggcggagagtggcggctagcggctctaggaggagaggaaggggaaaaggagggaggggatgcctcaccgagggtggccggcgcggaggaaggcgatggcggacggcgacggcaagccacgggaggacggcgtcggctagcggacgagctccggcgtgccctaaggaaggagaagagaggaattagagagagagagatggaccatggcgatcgggatccatggccgaaggcggcggtagaggtggcgctcacccgtgcgcgtggagatgagggctccggcgacgaacctcgacggaggaggggcggacgaggtggacctcggccacgcgaagctaacggcggcgacggcgtgagacggcggcgagcctagcggcggctagcggcggccggagtagcaaaagcggcggcggcgggtggttgcacggcgcggaggcgttggggagctcgggagaggtcggcgcaatggggaaaaagcgagagggggtgccggtgatgcttaaataggggatggggaaaccggacgtggccgggagcggcgggattcgacggccgacgtgggggagtggggaggagagagaggcgggattcggttttcgaatcccggccatctcgggcgcggcgcgagcgggagagggaggggaacgggcgcggggaaggcggcgcacgcgcgggcgtggtcgacgtggcccgggagagacggaggcgtgggcgcggcgtcggttgcggcggtggcggcgcgagcgggatcggcgggaggagggagacgggtccgacaggtgggccccacctgtcggcgaccccgagaggagggaggcgggcggccggctgtcgggctgggcctcggcctgcggccggcccagtaagggaggggaaggaagggagaagtgggccgacggcccacttgacaaaaaggagggaaaagagaggaaaaagaaaaagaaaaggaaaaaggattttccctggaattaacaattgtactttagtgatttttaattggttaaaattatttctagagctctgaaaattccactaaaaatcctgttaatgaatttcgacatgtagaattcaagaaaaattccacatgtcaaatccgattattatttgcattactttcttagggttttctcctgatttcaccagcattttcttagggtcaattataaattacaattttgactagggaggaaaacttcggggtgtgacaaacctaccccccttaaacggaatctcggccccgagattcggtggagctggtgaagaggtacggatgggcggccttcaactcatcttccctttcccaggttgcttcctcttctgaatgatgactccactgaacacggcaaaacctggtgaccttgtttctggttctcctttcgctagtgtcaagtatgcgaaccggcttctccacatatgttaggtcctcttggatatcaatgtgttccgaattagcctgttcttcaggtacccttaaacacttctttaattgggacacatggaacacgtcatggatgccgatcatagtggatggaagttctagctgataggcaacttctccccttcgttccaaaattttgtacggtcccacgaagcgtggtgccaacttgccttttgtctgaaagcggtgtactccccggagcggggtgacacgaaggtacacgtaatctccggcctcaaaagttagctcccttcgacggttatccgcgtagctcttctgtcgagactgagcaatcctcaatctctccctgatgattctgactttctcttctgcttccgctaatacttctgttccgaacagctgacgttcgcctgtctgatcccagaagagaggtgtgcggcacttccggccgtatagagcttcaaacggtgccatctgtagactggcctggtagctgttgttatacgagaattccgcatatggtaagcttttgtcccaagctccaccaaaatcaagagcgcaagctctcaacatatcttccaagatttgattgactcactctgtctgaccatcagtttgcgggtgataggccgtgctgaaatttaaacgggtccccatttcttcctgcagcttctgccagaactttgaggtgaactgactacctcggtcggatactatcttcttgggtaccccatgcaaacacatgatccttgcgaggtacaattctgccaatctctttcccgtataggtggtatgtactggtataaagtgagccaccttggtaagtcgatccacgactacccagattgaatcatgtcccgatgatgtccggggcagtcctgttataaagtccattccaatctcctcccatttccattccgggatttgaagaggttggagtaaacctgctggtctttggtgctctgctttcactcgttggcaaacatcgcagagtgcgacgaattcagctatttctctcctcatgctgacccaccaaaatttttctttaaggtcttggtacattttggtgctgcctgggtgaatggagtactgggtctgatgagcttcggtgagtatcagatccttcaattccttgtcgtccggtacacacaatctttctcccatccagattgtgccatgctcatcctcgtggaaatcccgagcttttccgactctcatgttctttttcagttctgctatttccggatcatttacttgagcggctctaacttgatccacgagcgtaggccgtgcctccagagcggctacgaacccgtgttcaacaattccaacgttgagatgttcaaactcctgccgcaattcctcacacatgccctcgatgcatagagcagtgcagtaacttttccggcttaaagcgtctgccaccacattggctttacccgggtggtagtgaatactcatgtcatagtctttgattagttccaaccatcttcgttgtcgaaggtttagatctggttgggtgaagatgtatttcagacttttatggtccgtatatacttcgcagcggttgccgatcagatagtgcctccagatcttcaaagcgtggaccactgctgccaattccaagtcatgagttggataatttccttcgtgtggacgcaactgccgcgaggcatatgcaaccactctgccctcttgcattaggacacatccaagtccgtgacgggatgcatcgcaatagacttggaagtctttcgtctggtcgggcaggatcaaaaccggtgcggatactaatttccttttgagctcctcaaagctcttgtcgcactcagctgtccatttaaacttctcgtctttcttaagcaactgagtcatgggtcgggcgattctggagaagttttcgatgaatcggcggtaataacctgccagtcctagaaaactccgaatctgcgacacggtctttggtggggtccattttgtaactgactccacgttcgatggatcaactgctacaccctgaactgtaatgacatgacccagaaatttgacttccgtcaaccagaagtcacacttgctgaacttggcgtatagctggtgctccttcaacttctcgagtaccagacggagatgttgttcatgttcctcttcggactttgaatagataagaatgtcgtcgatgaataccacaacaaacttgtccagaaattccatgaacactttgttcatcagattcatgaagaatgcgggtgcgttagtaagtccgaaagacataaccgtgcactcgtatagcccgtaccgagtggtgaaggccgtcttcggaatatcctcttcccggattctcaactggtggtaacctgatcgcaggtctatcttagaaaacactttagctcctttcagttgatcaaacaaatcgtcgatccgcggtaaaggatatttattcttgattgtgacctcgttaagtgcgcgataatcgacgcacatcctcttcgtcttatcctttttctccacaaaaatgaccggagcgccccaaggtgaagtgcttggtcgtatgtaccctttctgcagctgttcatcaacttgcttcttgacctccgctaattcgttggccgccattctgtacggtctcttatagattggagcggttcctggtgccaaatcaatccggaattcaatctccctcttgggtggcatggtggtgaggtcttcggggaacacctctggatactcgcagactatgggtatgtcctccaattttctcaagttcttctcttcggtgtccactgggatttccgtctcaatctgattcaacgaggctcctttctttggcgagactagagatttgtacaccacggtttctcctttctcattggtcagggtgactgtgcgattcgcacaatcgatgactcccttaaacttggtcagccaatccatcccaagaatgacatctaggtctttggattcgagaagaatgaggttggctagaaatggtgatctttggatttctattagcactgaagggctaaaactgactgaggttgaactatttcccggggtatgaaccctcattggtgtgctaagctcttctttccttaacccatacatccccacaaatttctttgaaatgaaagaatgcgttgcaccagaatcaaaaagtactgttgcagggattgagttaacagggaacgtacccagtacgacctctggtgctgcttgtgcctcctccgcagacgcgtggttgacacgagcctggataaaccttagcccggcacgcctgggcttcgggcatttgtcagcgaagtggccaagctcgccacagttgaagcaagaccctggttttgctcccgtctccttcttggcttgcgcgggctgggctgactgtgccggtgccattggtgggcgtggagctgcaccgcggttgggctggcctccctggtggttctgactgccgctagcgccctggtggaagttgctagagtggaacgggcggtgctgtcggacgatcatggtggtaggtccaccctgctgtccgggagtgaagcgcggtcggtgctgactaccttggttggatcggaactgcgccgcctttcttttcctgtccattttgttgcgctgatcctcctgacggattgccttgtcgaccagcctttcaaagtcagcgtagtccccggatatcagttggttggtcagctcgtcatccaggcctgccataaacttttcctgtttctcggcgtcagtgcggacatcctctggtgcatatcgcgcgaggcgattgaactcgtggaggtactctgtcactgtcctgttgccctgatggagcgcccggaattccctcttcttttgcgctacaaccccgtctggcacctgtgccttcctaaagctacggcagaactctgcccacgtaacttccgtacccggtgggcgggtggccatgtggttgtcccaccaagctgacgcaggaccctgaagctggtgtgtggcgaaagcgaccttctcctgatcattgcactgcaggagattcagcttcttctctatcgcatggagccagtcatttgcctccatagggttggtggtgctggagaaggtgggtggcctgacacgtagaaactcaggcaacttggactgagggggagggggaccaaactgctggtgctgctgttcggcgtgctgcatcatcctctgatgcatctgctggtgctgctgctgcatctgctgcatcatcgcggccatcatctgagtctgatgtgccataacttgggcaagcgtcggattctcgggaagtggtggcggaccattgccagaatcaccgttggggtgcacaccatcagcgcgttcttcaccgttgctgccctcgcctgttgcgcggctaccagtcctggtgtagaccatctggagggaagaacagacggggaaaagaagaaaaacagatgctcaagaactaagctttattatataggaattaaaactgcaattgttctgatctgaattaaaacacttaaaaaggcaagcaaaaatccttattaagacagccatatcatagacacatgatatcgaccgtcaactgaccccaaacaagcaacctaaacacacaaactaacaaacaaaaactagacagtcgatgaactagtggaaaaacgagcctaatgctcggaacggctcctgcggtcggtggagtcgaaagcgtcctcctgctcgtcacccggtccctctgagcgactcctggagcctgacggatcagtctcgccgctgccactgggagtagcagacagccatcctccggtaccactggctgaacctccggcggctgatgctggagcgaaggagagagtgaacgcgggagctggagctggagctgcaggaactgcgggcggagctggagctgctgcgggggccgctggtggaggtgggttcctgggcgccagctggatgcgcacaggtgtagtcgtcctcttacggggcgtagtgcggatccggactcctcctggcgctggaagacccttcaactgagcattctccttcttcaggcgcgctacctcgtccttcagagcgacgatcctcatgagcttcccatcattcaaggccttggtcgccttgtgcaggtccgagtgcatccggtccaatcccctcatcacagcacacatgtgaccgaaggtggtgtcgttctcgccagctgtcggacggaaggagctgacgccatcaccatgggctcgacgggggtggtagcggtacgccgtgtcgtggaagatgtagtcgtggcgctcccgtagtctggccatcatcaagtaggctgcctcctgacaggcgtgatctgctgtgcctccagatgcctcgaccgccatgttagcgaggcaagtccccacgtagccatggacctccaagcggacacggtgaggaagctcgccactgagcggcggaatggtcgtgtactccggcgcgtcggggtagcccactaccagtgtcatgcgtgccagctctgccacgaagtcgatcatgccttctccgcggtggttgggtgggtgaccggccatctagagaagacaaaggagtaggatcaatgtatgctcaaatccaaatttaaataaagcaataaagactcaaataaaggaatcaaataagagcaaaattttatgcatagatcattttacatgagcgcgaataaataagacagactcacataacgataaaataatgggaaattagatacataatagtagtaacaaacgaagcataaacaccttgcaacccatgataccgagctaggaccgaatgcatttcacccatcaaatcccaactgactgacgagtaaatcccaataattttactaaaaccctagactgactcgttttggaaaactcactttaaacgagcgaccaagatttttcccttgaaccacaagaacagatccccgttttcccggaacaaaatccaattgcaaagaacatatgcaatgaaaaggattcagagggctcttaggtctttccatttggcttgtcctacggtcaaggtcggctctgataccaacttgtcacgcccagaaattcccgaatagaattccaagcagaatgtgtattaaaacccccgtccaggaccagccggggtacacaaacgacaatgttgacatacagatccacgtcttacaaacattataaaagtcttacagagatgcagcggaaaacaaaagaaactggagctaagccttgacttgaacggcagcgggaacaccactccacaggcatcctcgacggcacggacgaagcctactcctcggagaacccgccatcggacacatactcgagctctgaggttggggggaaaagtagagcaagactgagtactacccactgtactcagcaagtcataccggaataggggtatgatgcatggatttaacaagggatagctaagcaggttcatttgcataaatactggcatttataaacaggaatttaatgcaaaaacagttgtaaaaaaaattaaacagtattaaacatccgctgtccaacgctaacccacgttgcgacaggcccaaccatccacctaaactatccaagttcaacagattacactagggtgagactaatcacggtgaatctggttgaccgcccataaccgcgggcacggctattcgaatagttttactctgatcagaggtgtacaactgtacccacaagacacagccccacgacacgtttccgtgcgccgacatgtcaccacgacataccggaaagaggccgtgacaggacccttcgcataaccccctctaaccaagcacaccacacctcaggtttcacccccactcctcgcaaggcagcgggcagtcccctctcgtgcctaggtgaatccggaagccgcatagaccgtcgcagggcccatccaaactccatcacgcccacccttgcctggatgcgtcggctagaggaaagctacactacaagcccagccgttgcccacgctggcttgtggtaagtacgataaattcttccagggcatcccgcgaaccggtccttaactgccatgggtgcgactagcaaaaccatgcacccacagcccaccatgtggttcactttatttaaccaacaccagcaacattatcatataaacctatagtctaggttttaaatgagatccccaatgtgtgctagttgaactaagcatggctaagcaattcctagtccaaagtctaatcatgttataacccaagctaacaaaggagcatgatatccaaaagcatggctgtaacaataggtatccatcccatagtgatattataaaacaatgcaatatttgaaagaaaacaatagagcatttgcaatataggatcaacatgttcaagtgacaagcatgacttgccttgctctgctgctgggggaacctcggcgactatcttgaagtacaccggagcgtcgaaggaaccggaatctagcgacatacaaagcaatcattgcaaacaggctataagactactgaaacagagaacaaaaccatttttaatggattctacacatttttcttgatttactgagacttgaatgggcttaaacggagctcggatgaattagttatgaattttagaagattcactgtgtttaatactataaaagaaatccttaaataatttattgcgcaatattaaccagggctgacgtcagcgagggggggggtgcggcgccgacatgcgggacccaccggtcagcggcatgggagagagaggaaggggggtggcggcgcgcgggcccaccggtcagcgacccggggaaaaggaggggcggcggcgccacgtggcggccgaaccgacggccccgatctacccaagggtagatcggacggcggcgcgggacctcgcggccggggcgcgcgggcgcggcgcgagacggcggcgaccatggcgccggcggcgcggcgctcacacggcggcggcgcgcatgcggcagcggcgcaaagcgacgaccgacggcgatcgtccggcggcggagagtggcggctagcggctctaggaggagaggaaggggaaaaggagggaggggatgcctcaccgagggtggccggcgcggaggaaggcgatggcggacggcgacggcaagccacgggaggacggcgtcggctagcggacgagctccggcgtgccctaaggaaggagaagagaggaattagagagagagagatggaccatggcgatcgggatccatggccgaaggcggcggtagaggtggcgctcacccgtgcgcgtggagatgagggctccggcgacgaacctcgacggaggaggggcggacgaggtggacctcggccacgcgaagctaacggcggcgacggcgtgagacggcggcgagcctagcggcggctagcggcggccggagtagcaaaagcggcggcggcgggtggttgcacggcgcggaggcgttggggagctcgggagaggtcggcgcaatggggaaaaagcgagagggggtgccggtgatgcttaaataggggatggggaaaccggacgtggccgggagcggcgggattcgacggccgacgtgggggagtggggaggagagagaggcgggattcggttttcgaatcccggccatctcgggcgcggcgcgagcgggagagggaggggaacgggcgcggggaaggcggcgcacgcgcgggcgtggtcgacgtggcccgggagagacggaggcgtgggcgcggcgtcggttgcggcggtggcggcgcgagcgggatcggcgggaggagggagacgggtccgacaggtgggccccacctgtcggcgaccccgagaggagggaggcgggcggccggctgtcgggctgggcctcggcctgcggccggcccagtaagggaggggaaggaagggagaagtgggccgacggcccacttgacaaaaaggagggaaaagagaggaaaaagaaaaagaaaaggaaaaaggattttccctggaattaacaattgcactttagtgatttttaattggttaaaattatttctagagctctgaaaattccactaaaaatcctgttaatgaatttcgacatgtagaattcaagaaaaattccacatgtcaaatccgattattatttgcattactttcttagggttttctcctgatttcaccagcattttcttagggtcaattataaattacaattttgactagggaggaaaacttcggggtgtgacaactgacgcgggagcgatcatcgctggctgccctatgttgcttcagctttgggcagccgagaggtttgccataggtcgacagtggtggacagcgcaccctacggggttggtcgcagcgcgcagtggccagaggacggtcccacgatggggacttactggtgtcgacgtggggttagtgcaacttcgctgcgttataagtttatcagtcgtctttttttttcttcacataacatgtctaattccgatcatgtttattgcagcgtcgttacgctcacgtccaggtgagacgtggttacccggacttcgtgttcgagtttgaccgtctccagccgagcgacgtcatctgggagccgtacacagaagaggccgtcgctgcgagagcaccgctaggactttcgtccttgtgcacacgcgaccaggcttactggctcaccatcctgccgatggtgttcgacattttcgttgagcctcactgcccgcagcgtgtgatgagacagttcggacttaggcaggtgtttccgggcaacgtgcagccgaccgtcctccctgccgaccactcgtgagttcggattgttcatttctaaatttttatgataattacttcatcgagccatataatttacctctcttcacaggttgactcgacggggacagctagcaggcgcactttgggctccacgtgtacagcagtacgttgacgactgggtgttagctacagaggaggtgatcaacgagctcttcccacacacggaggagaactaccgtgactaccttcgctggtaccttcctcgcactcgtgcgcgtgtgaccttcactccagacgccccagagccgcacgttgccgctgtcacggacgcgtatcccacgcaccgtgaccgagactacttcgtggcggtacgtcccatttgtattacttcttacaattatttcatttatcttgcataatataggacaactactgaatttgttatttccatcttgcataggctgatgccgcacgggatatcagtgccgatatcaccgcagtccaagtgaggttgaacagaggtttgcacttgactgacgttgagcagagggtgaccttcgaccggatgcaggagaagatgcgttcggtcatgcgcgtcttctcctgtcgcagcgccgtggacgtcgtacctccagctggtccggtacaaccacggcctcgcgcgcctaccgtcggagcaggacctcgacctacggcacctatttcgcacggtactgctcagcccagaggtttcttaagttttgtttctgtttttgtacgaaaacatcaccccgcggtaacttgatgttccatcctcgcaggacctcgtttgccttcgagcgcccctagcttcagagcagtgcgacctacaacaccggtttcgcacggtacagttcagcccagatattagttcatttttgtttcagcttttgcacgattatgtcaccatgttttaactgcacgtttcctcatcgcaggacctcgtctgccttcgagcgcgttcgcaggcacgaccggcgcttccacgagctccgcaggggcgttcgccacctcttcgggcgcgttcgccagctcttcctctcacggagcgtcgatccctcgcccacacggtactttactttttattaatactgttaaatacctgtacgaaactgatggtccttgtccagcaggatttgcagccgggatcttcggtactggggcctcttcatctcacgccggtaggactggtcctactagccagttctacgacgacgacttgcacggtgcagaccaccacgacgtactaggctcctctcagcttggaggagctccagaggcgcacactcaggagcagccagaggtcacacctgtacaggcaggacgggttggccgtgccgtacccccggaccgactcacgtactcccacgggcacattagggcgcagggtaggagggacaggggtaagaggcctcgtcagtagtgttctacctcttcagtccttatgtgaccgtttcttttggcttacaaacttgtaaagcagtactacttttgctattactactgcagtactacttgtgtttgtctcgtctacatagttcttttcattcatatggtgctagaacaacttatgctcacgacaacacactttcggcgctgcacggtagtgtcagatccagtagcgcgcatagtccacaacagcacacatgaaaagcggcagctcgagttatcactatcaactttcggcgctgcctgtttacataaagtgaatcacgcccacgcgtgatcgtcttgtcacatctaatgcataatgtatctcattgagttcacatatattgcagtgaaaacgacgctatataattgacaatctgaaggcaacctcttcatatcttctttcccactagcacacaacacacgaaaatggaagcctattcattggtaatacgtaatctagatttgagattatgtagaacattcttcactacaattttacattttggcagcaaaccaaatatgatcaaatgcaattttaccttaccaaatatttggtcgtgaagaaaaatttggcactaacaatccaaatatgccctaaaaattaataaaatatttgtacggtaacaaaatatttgtacggtaacaatccaaatatgccctaaaaaataataaaattgtattttaccagtcttggagattttaatcttgtatagttttcaatataaaaagatttgataactattgatatttatacaaaaatatagagcacagtacaaaatcgccctcccccagggcggcaagggggccgcctgcaaaattccatgccccctcgccgcccatttgcaggcggccccccgcacagtacaaaatcgccctcgcggagggcggcaagggggccgcctgcaaatttccatgccccccctcgccgcccatttgcaggcggccccccgcacagtacaaaatcgccctcgcggagggcggcaagggggccgcctgcaaatttcgttgacggccgtcgcccgagagcgaacggccgtctgccacgtcattttcgccgccctctgggagggcgatttttaaaaatcgccttcccagagggcggtaggcgactacttccgtcaattttcaaaatggaaaattattttttaaaacttttaataaaaaaaattaaaaataaaaaaaattcgtactatggatgtgttactactgggcctgatttaattcaggcccatcagacaaaaggccgggccagctacgatccctaagatttaggcccatattgatcgtcagcccactgtaggcctattggaggaagcgggaagaagcaataggccgcgtgggaagcccatattttgcgggctgcctttctgtataggccagagcgggtttgcggtaaacacttgattatactcctccattcacacatacacacacaaaaaaggaaaaaagagcaatgtactcctatccaacacccgggaggacgcatcaatttgactactgtttgactatccataattttggtcaggcatcttcatgcacaacaccaccactaattagtgctaaccttttcacgcgatgaaatggtctggaaccggaagcattgtcgtttgggtggagaactaaccacgttgaacacagagtcagtaactatcgtctatctgaatgactgaaggcatcaaaggcagccacactctgaatcaatcgatgtgagtagaaatacaggacaactcactgtcggatagtaacaacaggatagattgatgtgcattatccactttgccaaattaggcgtaggctaagcacaacctaagcttctgtataaatatccagcgtagtaatagtaaagtagcactgattatcatgcatttgccaatctagatattaccaaagtttgccagaatcatgcaactttatatactactcgtttcgaaatgtttggcaccgttgattttttagcacatgtttgagtgttcgtcttattcaaaaacttttgtaaaatatgtaaaattatatgtctacataaaaatatatttaacaatgaatcaaatgataggaaaataattaataattacttaattttttttaataagacgaacggtcaaacatatgctaaaaagttaacagcgtcaaacattttcgaaacggaggcagtactagagtactagtggcacttgcctttccgtcagaattaagcaagcagacatgcatactgaattcccgatttcagtcattcaagaggcacaccacacattgagtgaccacaaaccaacgatataaacaccatattgaatactcgagattgaatgatcacctaactgtttgtgtttttctttcccttcacaaaacaagctaggatgtctctccagtctccatataaaaaatgaagatgtttcaccactcccctgtaaacaaatctgcaggttgtgcaaattcccggagttggaagcaaatttgcagcctctacattgaaaggccctgtctgataaacctttatctgtgcaaatctgagcccagattccagaggaatttcttggcaccaacactagttcacatgggaaaaaagaagccaataactgaacagatgttgtgataatcgaacaggagagtaatgaatcattttcactttttcagcctaatctaaaactctcagttcatacatctccttgaacagccaaacaaaacagagagagacaccaaatgatccatccagttggatcaaatccatcatctcgatcttgacgaatatttacacatgaaagcaagcaagaaagaaagaagcgaagaaagagagagagagagagagagagagagagagcgagagaggagagcttgccaagaacaagggccaaatcagttggccgcatgcatgcatcaaggcgccaccgccgcgggctcggtagcggtggcgccgggcggcgtcgcggccggcgcgcggcaggtcgggcacgacgagcgccggcctccggcgagccatcgctcgatgcagcgcgcgtggaagccgtggccgcacaccggcatgacgcgcacggtgtccccgtcgacgaactcggcgaggcagatggcgcactccgcggcgccggccagcttggtgcccgccgcggagtacaccagagccgggggcggcggcggcgggtcggcctcctgcacaggcggcttctccgggtcctcggcggcggcggcggcggcggctggttgttgcctggcccggcggtggcggcggagcaggtacctgacggcggcgttgagcgcgagggcgagggcgagcgcggcgagcagggcggcgaggatgacggccatgttgctggcgaagtcgccggcgccggagtagggaccccatctgttggtggcgatggtgctggtcgctgccgtgccgttggacggcgagcggtgggcgtggtccggctcgtgctcgtgctggtcgtgcggcgacatcgccatggtgatggtggcgttctcgagtagactagactagccaagaatatttcacttttgtggtagtagtcgagtgaggtttaagcttagtgcagtcagtatactagctaagctttatatcactcaagtgcagtactcaactactcaaggggagatgtgttgtgctcagctcacctctgcctctgctgctgatgaagatagatagctatagcttatgttgtgaggtgaaaccggtggaaatattcgtcgaatatatatatacatttttttgataatgcaatgaaaatcccatcctctactttagctgttacttattacaatattattaacttgattgtaaagaacgtgaagcacaaacagggtttgaaatttcggttcgaaatttcgcccccaccgaaatgctcacatctcgcccgaaactttcggttttttgcaattttttgtgaattcagtcaaactttattcaaattcattcaaaatcagtcaaaatttcaaataatttcgtacgaaaaaaatctgaatttcggttctttcgctcacctctggcagaaaaccaagtttcgaaatttaaaaccctgagcacaaatcctttggccacgtacattccggttcaaatgtagtggccggatttaaatccattttcataaaaatcaagcactggttcgatccattagtaaatttctgttcatgcttggtgaatgttattaataaaccggttgattttggaggcatgcggatgcagcaagagccaagagcaggcagagggggtgatgtggcatgcagcctttttacatgtggagtgttcctttgcttgtagtatcatctgatgattgctgcgtccctccttttaattttgtcacttcaatgcatgtgttctctcttgtcctatacatcccctatctatcttcaaactgtgcatcgatcgatctggcaggcatgaggagaatttgtatacatccgaaaacatatacatatactggttaattaagaaaagtcaagtccttttagctactagaactgtattactacagttttcaggctctcactgtttctgtataagctgccggttggtcgtcagtcagctcgatcgctcagataaggtcaggaaggacatacagtaattaagctcttggtgatctgaaattctgatttctcaatcagatagatgataagacattcatttggagtatacagttaattaaggatgcattaaggagctaggagtagtacatttggtgtagctagatgatattctcacgcattcagcaagtggcaaaatgcatgcatgcagccctgctggtctgaactctgaacccaaggatggacagctgaatgtttgctttttttctgaaagagtatcatctgagatctatatcattatcagctaagttcacggccgatatggcgcaatgcaacgctgtagctatcaggccgcttgtaagtatcctttgtgctctcttctattctgttgtcggctacagctacagtacacccacgtatacctgaatatcagaatatgagataccctgatgatgaaaaatagagaaaaatggaacgaaaaatataaatgctagattaattgttcttgggatagaaagaaaggttccaaatgggtaaagctgcctaacccacaaacacacacatgtatatatatgcaccttttttattagatcagttcctttcagatgggggacactagactgactgctacagagaaacattggggcctactgctttttgatgtcctgcatttcacatttctttttgagaaaaatgatgcgtcgacgttatggtacctgatgatggaggattttatacggaatataattcatatacatgatcaactagagctacttgtcttgtctgagttacatgtaaggttaatgaagtataagatatttattacttgtaatgaaacaaggagactatacagcatttgggaaaaagaaagatagagagataaaagaacaggacaagaaattaagagagaataagggaccctttcaattgggaaaatggagggggggtaaggaaaacacgggaattttacaaaaatgtaaatataaaatagagaattgtaaaataaagaaaaaacatagtaataatatttttattggaccataaaaaaacaagataatttgaggagagataatagactcaaaagaatatttctatgggtttgtacctcatgttaaatttcctccaaaacttatatgaaatgagttattttctatgatcatatagtgttcatttatttgattcaaatggctatataggaaaaaaaacctctaaaatttctagatttttctttaaattaaagggggcctacctaaaataagagggtatcgggagtggaccctatatattttgtatgataatatgatagtaaagtcctaccaggcagcaaaatcgttccaatgggcgaacaaaattaagaaggaatcgtacgttttcattagcgtgtgatttggttgcgtatgtagtccggacttaaatcgcccaattactcgatcaatcaacattccctttatgatttctttttcatttttgcgctggtcgatcgtactggaacaaggacgacgaagacgccgtacaccctgatggcaacatggctagcttagctagctgacgaacgagattgattgcccgatcgattgttctagctagatcgatcgggccgctggaaggaacgaaatgaatcaagcaagtagtactgtaatcactaacaagggagcatgtcagtctaattgtctctttgactaacaaaattgctctattaggatataacttttataaaatgattaaatttattatactcatattcaaaagtattgtactacttttgtaacagagtaactgtcaaaaaattaatctaacaaaacagaacaagtatatttttaacctacagaagtgatcgagtagaactgtagaagtgtacatgcatgatgggcatggagtgccattccagcagcaaactgagaagctcacaaaagcaatcatcgaatcgtcaaagatagacatgagtgagagtatagacgatcgatgcatgcatcgaggaggccacacctgccggggccatccattcattgttccaactaacgacacacctatcttctatctatagctatttcgcggcgaccacagattctgcccaagcggtttttctttcttggagtaatacaattcttttcatcgtaaactagtacaaatatatattagcaaaactatgatgtactccatatatataatattttttccgtttcacaatataaatcattttaacattttccacattcacattgatgttaatgaatctatatagatatatagaaaatgctataatgatttttgttgtgaaacggagatagtacttcatttctttcgtattgtaagttatttaagttttttctgaaatcaaacctctttaacaatttgatcaagcgtatacatcaacatgtgtgataacaaataaatatattatcaagacacacttctaggtgattttagtgaaactaaattgatattgtagatgctggtatattattctataaaactcgatcaaaatcagaaaatattgattttggcttggctagtctatttgcatagaaagcaaagtgtgggtgattagtgtatgattgattaaggtttaactatttaaaaacttgataatgggtttttttatttctttaaagagaattatataattattttcgttttgcacgaaacacaatatttgtcaattcgaaaagcatgcttatgataaacgagaaagtaacaagttctaaccatagtatcgaacgcaaccttacaacataaaacaaatagatcagtacatgatagggacaaggttttcttttcaaaaaaataaaactgaatgtgcatagtcgagtacaagctctctcttacagacgggtaaagggttatctttcccatgataaacggataaatcttaccatttttttattttataaacttgcttgcgttagataataaaatttattctggccttggattaaaaaaaaactacaactaattattagagaaagtctataactgcgaattagaaaaccactcattatcatgatcgacggttggactactgcaggcatggaagcaatcggcctatatgcaagcaaggggggcggcctgggtgtgggtgtattgaatggagtgcccggcccggaggaggagaaaaccaaagagaagagaaggttgggctacgccactcaaaactgatagcagctgattgcactgctgctgctgctgcaatctactcgtatctatcgctcatcgatcgctgatagatagatatgaatgaatatggtgcatgggcgttggttagtttggttgggttggttgccgtatggatgagggaagcatgcatttcaggaaaatgatacatatagatagactgattgattgcttggcactgttagctgttacccgatccatccatccactactgtaactgctgtatctgtatctgtatgtacgaatgtatgatggaccagcaaatctatatatcgatcatctgcagctgatcgatgcaggcagctatctacctctatgccatgcatcctttgctgctaattgtacatggttatggtatggtatgttcctgcagttatgccgatcccgcttcacctgctaaaaagaccagtacatccatcccattcccaggttacaacaactcagtatcggatttgacctacaattttggatgtcatgtatcgggacgaacagagttacaatatacatgcgtgctgctgcttatttactgccagctctttctgctagttggataaatatgggcctaacaagattgttctgtgggcctcagttaaatgggcttctcactccagaagagaagatgggcctaacatggaagcccacctaatgtcccccatgaggcccatgacaccatcgacaaggcctccccccccccccccccccccctcccttccgactccgaccgtccgccgccgtcacctcgccgccgcctcctcccctctccgccatagatacggatcggaggagaaggagggactcactccaatagtatcgtctattattgtttgttgctctcccctcccctcccccgtgcgtacgtctccgattaccaaccaggtcgcccgcctctcgtcgccgaccgggccggagctgctcgatctgctgcagtacgtccagcctgcagcaattcggccgcccgcccgttgagaggagagggagaggagatgatctcatcttgccccatctgcaacgtccaggttcttacggctgagctccaatggtatagctcttcctctttcttgatttcttcttctcctctctagtctctctctacataacgtacagtatgctatgctactgctgcgattttacttacctccattgtggtctgtgcttcaccaaactgattcttttcatcttttgctaggcatgcgaatgcccattttgacgatgatcaactccaaaccgacatggaattggcccaccaaatcgccctcactcaatccacgcccaatcccctgctgctggtctgtactcctccccactactcttattctgctgctcgccttctcattcttaagtttaacctatgctgcaaacatttcctagtaacaattacactcctgtcccgcctattatgcaactagctaaatattgctgtcattgtcctactacttcatctgtttctcctataaggagtgaaaaaaattcccatgtagctgtcctcttttgcaggacactcatcaagaatgtaacaatctgttcgctggtgatcctcatgctcaaggagcctcctcaagcatcgccggaagctcatcacttcagggaagtgttttggatgagcaagtatcttgcttgctccaagcgcaactccgaagcaatgttcaggaaatacaaggaggtgttatgaacttgttgagagcctgcctggaatcagaagctggttcatcgacaagtatgatatcaggacatgttgatcactatcagagtctttcatcagaagataaggggtggggatgtgggtggagaaatatccagatgctgagctctcatttgctgaagcaaaggccggaagcaagggaggctttatttggtggttctggatttgttcctgacatcccttcacttcagaggtggcttgagattgcttgggataagaaatttgatacccttggctcaagccattttcataacaaagtttatggcgccaagaagtggatagggaccacggaatgtgctgcccttctccgctcttttggtttgcgtgcaagggttgtagattttgatagcacggaatcatcaggtcctcacagtaagaacggaaaacatgcaccaaaaagagtacaagggccaatggacaagttcttgataaagaatgtttctccaacatctacatcttctgaactttgtcgagaagatgctgaaaacatgagaggccaacaggttcttgttgactggatctggaactactttgctagcaggcattctgataactcggacagttcaaggcgtgtgcttgtgagtgataaaacgtaagggatgttctcagaaatgttcaatctcaccatctgaaatgcttgcagctttcgtaagtgcatgttaacactacgcttaagaatgttgtacactgactaatgtgtgttattcgcagcccattgtatttccaacatcaaggtcattccagaaccatagttgggatccaaaagcaaaatggtcaacatgggaatcaagatcgatttacccttttgattttggaccctggccatgtaagctgtcgctactattcatttttttaaaagaaaaaggaaaaagaaagttgttattattcactttgtagtatatcattaatttttgttcaattgtgcatattttttattattcaatcttctgtaaacatccagaaaatttgttctacatttctctgccaaattaagatataaactttgctctaacggtttacagagaacgtcagatttggagagggctcttcgaagcaagacaggatggcagcgtctagtgaaaagaggtgtccacactcttaggaagccacagtatcaggtacatcaaatcacccaaaatttatgaactttgaaagggttgtgcagttcatacaattctgatatgccttcgatttttcagttgtgctatgtggatcctggaattgctagttcagaagaaatggagcagctgaaaactattgatagtatcctggtcaggttctagaatgctggtgcgtacaatgagtaatcgtgtcttactttgtcacatgctaatagaggaaaatgatacagtttgctcgctcatgtatatgaaaagtcaaaagataatcaatgatgtacttgatgaaaagtttatgcaaaataacaatggatttacatacctgtattttgttgcttcatacgaattagtaattttggcctacttattgacattcaacattggtcgtctcaattgtctttatctaattatgcaaacatttgttaaatggaggagacaggggaatacatagactacaaggcttgggatgctcttccctgcttggagaaacgtggaccattgatgcattgctgactgctgagctctgcgttgggttttataatgtatgtatggcctgtcatgcttgtctctatagagaagtccaataatttccttttgctttgctcctacttatttaaacattatccggacactgagcattgatgcccttaaagtcattgtttttttagctttatgtatattatttcctttagagttttgttccatctatggttgttctctcttttttagttccattggtttctttcttgtattctaggattatataaattaatttatctattcaagtagcatggtgaaaatattagaaaatcagcaacataagaacaattttgatacagtatttcagcaaatctaagaagtaggagtataaatatgagaatcaatgaactttaagaagataattggtaagcacatattgttattacaatccttcacctctatttacattattctttacttttatgtgcattcaactgacattcatgtcagtattattacgtgtctatgtataacttcttaactttattgttgaatattccttactgcatcctggttgttcatggatctatatactgtatggttctggtagttgaagctggcaaaactgactacatgagcattatgcgtttaccatgaaccttactatgccaattctggaactgtttactgtggtatagatgcagtttacgtagaaatgctttggcaggattgctgctgcttacatgatctgtgaagtaggctgaatgtcttcagattgcttattccagtgcatagctcttgcatcttattctgtgaattaccatgtactatctgaagttgtgaattgatctgcatagagtgtttgcctttattttatagatgccttcttggagaccctcacaagtcacaaccagttcaactgaagtgggcgactttcataatgcatctgattctgaacactggggttgcatttagttacaagatcagattccaatagcaaatcgagaggtgatcggtcccaatagattgtctgaaactggtcaggtcatctgaaccttgacaagatctgtagttgtcatttctgttagaatgtatgccgccttggtaaatattccttggcagatagtagctcttttattatgtgaaacagaacatctgaacgtgactttggtaatattccattctgcatatgttctctcgacgccttttcatcttcggtgcttacaatttgcagtctacctttgatcttcctttttccctctcccttgaggtctcattttccctgtctgaaatacgttgggagatcatgcaatttccactaatattggtgcatagaactgcactattttgtaccgacatttgtcaactttcgtcatattgagcggagcatagtaaactaaattttgttactgtcattgttagtatagtattttgttgctgtcattgttagtatagttttcttgcctttgtaaactactagtaaaacagttttcactgtaatggatgaacagtccagatagccgatatataatattttgacagtggtacatgctgtcatgcagaagtgctgacaaaattcagatccattttgaggtccactcccttcgtcccacaaaaaatcaacctagtactagatgtgacatatcctagtattataaatctaaacatatctctgttcagatttattctactaaaaatacgtcacatccaattctagattcattttttttagggacggagggagtaattcacattagttcagcatttcacttggcagaaagtaaatgagtgccagcaaatgactctggctgctaagcccaattcgattgaccatgtcatatctggtatggaactgggatttggtatatttttaagctagctgtctttgtagcgtcccagcataagttcagttacttgtgtcattagattaagaggtaaacatatttaattgagaagaaaataatttgcactctttagaccagcctccacaaacgaacaggatccgccgcactctctagaccacggcactactcagcgttctttctcatttttaaagaccctgtcagcttcattcattttttttatgaagatatccttagcattattagagctttatccatgctgtgtggtacacagaaaatctctgaaaattatatggttctctactaaaacgaccatattctatctttggaatttcgatcgaatttaaggagccgagcacacgcgtgtaaatataaagcttttactagtatttttctgctttgagaagaagagcaatttagttgcacgtccaactcttcctgtaggcaggcataatgtagccgttgaaattaaatccctgacgaggatagttactgattaattattggtgacagcggtagttaactactcaaaccgtggtagtggagacagcagtgtactctatttaccagcaatttaacactatgtaatattgttcttcctttcattgagcagtttgaaacagatcatttgatcagattatttatactaaattatctacacgattatatacataaattaactattataataaataaacttaacaaatagcttaaatcaataaatctaagcaatcgatagaattttttatagaaaatatataattttaaagacttaaaacaaacaatcagcaataataatgttttattttgagatggtagatgacgacagaatcacgaaaaagacgtatcaatgaatttaagcaatcaatatttttttagaaaatatataatttgaaacaaataatgggggacaataatgttttatgttgagatagcaggtgatgacagaatcacgaaaaagagaggctaccgtggcttatctctgtgggccccattggtcagtaggatattagggagacatgggcccacgcgtcatcctcacgggagcttcttgtcttctctttacaagagaatagagaaagaagacgaccacgccaccaccgctcgtctccaccgcgagcgaaacccaaaaaggcaatggcgaccgacggcgacgccctcgagtcccaggcggcggcggcggccgaggcggcgcgggagctgcgcgaggccgccgcgtccctcgtcgcccgccgctccgccgacgaggacgcgctccgccgccgcgccacggcgctcgacgccgacctccgccgcctccaggcctccctctccaccctcgcccccaccacgctcgacaaggtgactgcatctcgttcttctcttctactcatctccctcttcctcttcctctccccgcgcttgcttccaattcgatctctctctctctctcactcacgcgtcgcctcgtacgggtttcggcggcttggaattgaaacctacgagctgctagtacgttagatcgtgattcgtttcgtgattatctcgcaaagcagaacgcttacgcgcttcacgccttcgcctggaggattgagatgtaaagtttgcacgcccgcgatctggtgctcgtcaaacactggatttgttgcgccatctccctggagatgtctccaatttacatgcttcctattggttttcaaagttaggaatctgaggcgtgtgcatcgagctggatgctggccatggccaacgattattattgttgttttttgtattgaaatctcgaggcagtttaggcaaactatagattccgtcagaaatctgtccccatcctttactgctccgtttagagatccttggaatattcgctctccctcatgcttgtgcaaatttgtaatgcatccactaggttgctcagtacctggattgagaaacattgtccactgctccgtcgttgctaagccaaaaggtttaatctcaacctagagaattattacaacctatctagatttaatctccactgtctcccatgcatttctttagcacgcacaagtgacaaaatttgacctgtttctaaattgatataagagtctccgtccgcatgtccaagtttatcgcactcctttttagattttctacttaccttttgtacctcttttctaatatatagttttcttctgtacttctgttgtgtcatctgtgagaattgtctcattctgccatttatctatataggttgaggaggaactggagcgtgccagggtaacaatctcagatagtgacgtggctgcatttctcccaagcaagcggaatggtatgctatgatttatctcaccccccatgcccgtctcggggaaatataactgttatttatggaattcacttctccttgaaatttagggaagttcctcaagacctttgttggccctgtaaatgtgcgggtggcgagaaaagaagataagctcagagtgaaggacgagtacaacaactacagggtagattttagatgcttcttcgataatttttttttagaaagcttatgcatttactttggatatgatttcttggaccaatttaataaagctatctgtactttttattacttttattttgatgacttaagcattctaaatttccaatgattactccaattggtgtattctttaaattttgatctgtgataagaatcactattgaagagaactactaccattttctacaaaaatctaagtaaatttcagattatcaaggtcaacgagtatggtgtgtattcaatctcagacagcatgctgataaaaccttgaacctgttttgtatgtcatatggtttaattagtaaatacgggaaacatgcaattctggactaatactctagaaatcatgttgaaaggttatgtaagtgttccttttcatgtcgaattcaagcagtcctttctaaattgaacatagtggcttaactggtagagtatacttggtataattttcgctactataaatttttatgtcatgcctgacagtattgatggtttcatttatttgcaggatagggctgcctatatgtttctattgttcccatccattctcctcctacttagatggtggatatgggatggatgccttccagccttggcagttcagatgtaccaggtatttagtgccgtgcagtgattgaccctgaatatattttctctatgtatgactttgctgtccagcagaaacgatctaaagtttatttgttccacttaacaggcttggctactattcctttacacaagttttgctctgcgggagaatgtgttgattgtaaatggaagtgatattcgtccttggtatgtgtctgaatttcattgcttacagaaactgtcaactgcagcactcaacaattttatggcaaatacccatttttaatgcacggacagacaaaagtgcttgatttttttactatatgcgacttataatttgttggtatgggaaagatcttatatcaaaacatcttttaatgatattcgtaaaacccatgtttcgtttgttcacttaatctagcaaaatcaattcctttcttagaatgcattatcatcttttcaggtggatataccaccactatttagcaatgctaatggctctcgttagccttacatgggagataaaaggacagcctgattgttccagcaagcaggtaaatgatcatttttcagagaaaactagcactcactttgtcatcaaaccttcaaatttttggaacgctgaactcagacactatggctttcttttcagaggggggtacaacttttcctgcggtgggcaatcatgcaaggaattgcaatgcatctacagaataggtaccagcgtcaaagattgcgcacccggatagctctaggaaaggtaaggttctgtggttcacgtcttgcttcaagacagtactcaacaacatattcttttagtgccaagtgaaggtgtacaacatgttccaataataagattcaaatgagtatcatcttcaaatgatatgtatacaatgcagatgcttatcaaaagcaatttaatgcactaatttgcttgatgtttgttgatatttgcatatcagctaagagttcggaatatcactgaaactaatttagagaagatgctctggtcttttaatcaaactaagtcttataggcaatggttgttcatacagctcaatagactgttgaaatgatgctgtatattgtatcatctatgtacctttctcaagttttatcggtgttgttatttattctgtttcatatttaattgcatgcaggctaaaagaatggatgttgttgctggagaaacagctggtgtggaagggcagctcttgctactttacccggtccttttcacattacaggtatgtgtaaatgtgtcttgtgagctgaaagcatggcagatccaagttgttagtaattgtagccccccacccagaatatgttgtctcacgttgttggttcttgatattttagtcacttgtttcttttccttgatgaagtttgcttccgatttctggatgttagcacaaagatgattaattaaccattatatatatcttccatattctgcactaatgcgcttaatcttggatgctatgtgttgtcaggttttcgaaggatatgttggagtattacttcttaagacggctttgcacgggcttgcatcggaatggcaggcaagaattatcaactatgtaatgtttgcagttgatagttaatcagatcttcatgagacttaggctgagtttgtttcttagagttcccaattccccttattttccgcgtgcacgctcttcaaactattaaactgtgtttttttacaaaaaaaattctataggaaagttgctttaaaaaacaaattaatccatttttcacgtttttttagctaatactccctccggttctatattaattgacgttttgaacaatgttgaggtcaaacttttataactttgaccatcaataactttaaaaatatttagtttaaagaaactagaacaatatatataaatttgtctttcaaagcactataataaaagtaaacatgcatttatttattgtatatattataatagaaaaactagcatggtggcccgcgcagattgcgcggctagcatcattatattttctatcatataatagcatatatgttttctcattatattattcaaatatattaaaatgacaacataattttaaattttgcaatatgtgtaatattcatattatattttatatacatgttagttattaattatttttaatatcaatttttagttatttgtaaattatatatattcctatatggactctagactcgtcttttaatatttcctttttttaattccgaattttctgtaaattgtatttctatatagactctatgctcttctttcaatattatttatttttatttctgaattttcatattatattttatatacgtgttagttattaatatcaaattttagttatttgtaaattatatatattcctatatggactctagactcgtcttttaatatttcttttttaaattccgaactttttgtaaattgtatttctatatagactatgcttttttttcaatattatttatttttatttctgaatttttattatttctaattgtatttctatgtggactctaaactcatctttcaatattcttcaatttttaatttcgaatttcagttactaataaattgtattcttatgttgaccttaaactcttcttcccatatttttcttaatttcgaattttagttatttgtaaattgtattttttatacagactctagactctacttttaattttattatgtttattccaaattttagttagttttaaattcctatatggactctatactctacttctagtatttcttttttaaattccgaatttctattttttttcttaattgtatttctatatggactctatactctacttctaatattccttatttttaatttcaaatttctattatttcctaattgtatttctatatggactctatactctacttctaatatttcttgtttttaattccgaatttcagttatttcctaattgtatttctatatggactctatactctacttctaatattccttatttttaattccgaatttcagttattttctaattgtatttctatatggactctagtctcttcttctaatattccttattttttaattccgaatttcagttatttcctaattgtatttctatatggactctagtctcctcttctaatattccttattttttaattccgaatttcagctatttctaaattgtatttctatatggactctgctttttctttttctccgattaatgtgagaatttctaagccatgagagcgaacgtggaagctcctttttctattcctttaattatataatagataaggtcaaagatatatcttgtagaccgtgtctttgtccaaaacgtcaattaaaattaaactagagggagtacttaattaatcatgtactaatgaactgctccgttttccgtgccggaggggaacgtttccaaccagcagaaacgaatgcagccttagattgcttccttgctcaaatctactgctgtttggcctttttgctcagtcatctgcataaaatgcatttccgtaatatttgaaaggaaaaagaactttttagaaaatgtaatgtgctgatgaagctataagctaaacaatcccaaagcatccttgagatgctgattgtcctcaactgataatttataacgctgccatttttcacttgccaggttgtagtttgtgggatcttgctggtggtaatggcagtcggcaactttgtcaacacgatggagactttgatgttaaaattgaggttcaaagcaaaaatgaaaagagcaaagagcaggcaggatctcagtcgccaacaccaaaattgacaaagtgacccataatggtgactccatgcttggaaacagcgaatgctgacacaccatctctcttgtaaatcccttaatccataaactgttttggctgcccatgattttgtgttttggtaattgtttcacattgaagttcatattctacggtcaatgcacgattaaaaacactgttaactttaccacagatgggaacgctaaatttatgtgatttgtatgtgctaacagcgcttgcctaaaattgcagagaacaataatgtattatgtcagtagtcagtagattccgtggctctaattgcagagagctagtaacatgctgaaaatgaacagtccacagctcagaccatatcaatgcttctgtggctctatttagtggcattagaatcgtgttcagagtcttgtccaaagtttgaatgtttcacaggtttttttatgtagtgccatcagaatttgtgttcctctatctttgtgtttgaagggttccatgcagaacacccagtgatatagagaaacatcaatagaaatcatttggtctgattggacatgagagttgtaactcatcagtatgatctgtgttcttacaacctctggttggtctttaatccatagaactaacatagaagaattggcagcttgtaaaccctttacctgttggttgaaaagtcaggagtgtgtgataaccattttgttccccattttttagacaatggaattttgttttggacatactgttgtacctattgggaatacattctgcatttatgagcttgcatattggcaatatcttccatgctgtggtccagcaagaaacctttgcaagtttgcagacctgccaatcatcagtgcttgagacaaagcaaaaggcaacggagctcgctactgtgtatcactctgattgcggtagcctctgttctagtacctcaaattctttcaactactgtgtctaatcatatgcaatccatccaatgacatgcaccatcatgattgaatcattgagcccatctcatctctgtatgattagtttttgtttgtcagttccacacctgaaacccaagatcatagcatccaaatgcacaagctgcactcttaatttagaaatcaatatttacattccagtatttcatcactctaatcaattgattccagttctttcctaagcagtgttcatcgtttcctacaattaattaattaccttgccaataataaaacacacagacacaaaaataactaagtaaatcatctacaaaataaaaataaactgcaatccgatatccatcatgtggaatcggaggcatcgtgcaggtcgtgatgagcaatggagatggacgtcgccgccttctccgcgatggccgcgcgcacctgcgccatcgtcggccggaggcccggctgcgccgccaggcactcgacggcgatcctcgccacgtcgccggcctccgccgcgtcgtagtcgtcgcccagccggcggtcggcgagcccgtccaccccctccgtcctgacacgcggcagcaaccgcgccgtgaggttgcccccgccggcgccgccatccgggccgggtatcccggcggccggcgagccggtgatggcctcgagcagaagcacgccgaagctgtagacgtcggacttcttggagacgatgccggtgcggaggaagaaggggtcgacgtagcccggcgagccgacggccgccctggtgggcgcgacggcggcggagaacccctcgcaggcggagcccaggtcgcagagccgcgcgcccaggccacggccgtcgaggagcacgttggacgccgacacgtcgccgtgcaccaccggaggcgcgccgtcgtggaggtgctcgagcgcgccggccacgtcgtggacgacgcgcatgcggtggcgccatggcagaggcggcgatgcgccgccgtggaggcggtcggcgagggtgccgccggagaggtactccaggaccagtgcacctccctcctctgcacgcagtaataaaatttcttttaattaattaatctctttaattaacaaaaaatctctctcttagtaacaaacgtataatattataaatcattttgacatacatataataccaaaatagttttattaaaataaaattaaatatattttgataacaagtttgttttatgttttgtatataaacttaaataagtttaacaaagaaaaatcaaaatgatttataatataaaacggaggggtagcaggttaattagatgaagtataaaatcatttgcaatttctttttcttttttggggggatttgcaatttcattcatctggggatcaaaattgaattagaattaggattaaaatgatatatacgatcgaaagcgatcgtgttgagttaagttttggacgacgaaatgggacgaaaataacacaggtcgttactcgttaacgtactagacataaataggcaacagtgaagtgacgtttgttcttaatcgatcggtaggtaggaggtaatctccatttcttcttcttattgttttccccccgtacgacgtacgcatgccattctctacacatgttttattcggtcgatttgaaatttaatttgtgaggtgaaatgtaacatcatactagtagtattcatattgaactaacttaataacaaatcttaagaggagaaagaaattaagcaaagtaaataaataagaaagtgaagaacatagcaagcagcaagctggagtagctagcatcagagttgcatgcagatgcagtgtaaagcaagtgaagaacagaaaaaagatgttcccttttaagacttttaaccacaccgagacgaggtaacgtaagcttagagtcaaagcttcaataatttgtgcaaggaaaaaaaacacacataattcaagcagttggagtagtaggagagaggagagtgacgtgtaccgtggtcgtcggagtaggcgaggagggagacgatgtgggggtggcggaggcggcggagcaggtcgagctcctgccggaacgcgcgcagccaccgctcgccgccgcaccaccggtgcaccttcaccgccacgggcggcgagacgacggcgaccctgcagctgcttgccaggtagaccgtgctggagccacctcgccccaccaccgccgcctcgtcgaagccgccggtgagcgcctccacctcccgccacgtcagcttccaaggctccccctcctccttcgtcgacggcaccaacttcgccgccggccgcaacaacggcagctcttgctgaggaggaggagaacacggcggcatcagctgtcgtgctcccgccccgccttctgcggcctcggcgtcgacgtcggcggcggcggcagcacggtggcggcgccggagcccggagaggcagtgacggaggaggaggaaggtgatggcggcggaggagaggaggaggaggcagaagaagaggacggcgagcgccatggccacgtccatggcgccgcgctaagcttagcttcttcagtttgggaaagaaatgcaaagcaaagcaagagcagagcagaaaatgggttcataataagtatgcatggccagattaatgtacaggtggcagtttagttttactacttaaccacagctttgatttgatttgatttgatttattaatccctaatcttgattccccctgtgggaatttaatattaagctagcccctcaattctggtcaacgaatgattatattaacaccatggtctcatctggtctctgtatatacatggttgctgttaaaaattgtttttaattcataatgtgaataattacactgtctcttttaatttatttatttattacagtaggagtagtaccttcccatacggtgaatatagagtcaacagcatcacatgaaaattaaagagagggatagtaggatgcattaaataattttgcagtacaacaacattttgaaaatctctgggtccttacgatgtacggatacagatatatgaaatttaaattttgggagtgagtaaagatatatacacgccgacacgtatgcacggcgtacgcgtatacgcagttggttggatcaaatccccacgagttagcgactactaatcaatttgggattaatttgccgatcgagaatgaacagtgcttccagttaatgttgttcctgtcagtaccagcagtttgtactcagtttgcgtggacggcgcattataatatataaacactcctccaaatactcagtgttgttaatttggacagcgcaagtaatctcgaatttaaattttgagttgtttttggagtattttagcgacgatcgatcagtttaacggactccacgaggacgacagcttacgaccaatgagttaatgagtggtgggttctcccatgccctgcagttaatctactgtgcaatacttgtgttaattacttcttcacctgcgactactgttcttctgccagccaacacagtgtcatgaatcattttgatttccatacacacgtgtaacatccataatttaaattttattttcataaagtacaacatactagtgtgttcatttcgtgaaagtgctaacaatcttatcttatactgatatggtttttcaagctagctagttaaacacgatttttttcagtgaaatttaaacacatgctccctctttccttttttttaactcctatgtgatacgtaagaaaacaaagggagtatcttgcacgcaagctagaggtgtactaggcatagaacgtgacaagagacagaaaacaaacaaatctaacgaactaccagataattacaattaattagtactcctaattaaacacaagagaatcacaaaccaacttattagcggcgtatagctagtgtagagtggtactgccttgattttaatttagccgtgtgagtgaggcaactgtgatatgcctagctagctaattaagcaggagtagtactaattactacatcctatcattgatgagctctatctatccagctcgaagtaactcatgtcgctcttcacctagtggtacgatctagctagctaagaaaacccaacgattgattaaggttgatctgttttagcttgtcgtaactaaagctggagccaatcatttaaggtttaatttgcatcatgtgtatactccatatatatattgttgggttagttatgcacttatgcaatgcaagcaaagaggttaggttggatttatctgtggatttgtcagcagctgtaggctggctgcttcagttttttctgtggattaaatctgtcccctgtgttcagaagctgcattatattgctgcatgcgtgtggacaagggaaaaaacgcatcgcatgcttgatctttatggacttttggtgaagcgtcgctttcttggtttcatactgacaaagtcattcataagcaatacgagctaggctgcagacaaattgatgatccattttgctcacatgtacaactagccagctagctgattcaatggaccttctggtatctcaaactgcttacagatggggaaaaaaaggatagtagatttgttattatgctgcagggtgaatagactgaattctgaatataagtcactcatgtttggaacggagtaattaacgctaaatgtaattaattaagaaccagttgattgattcgttcctacttcctactactctcactgtcatagcagctgcactgtatctatccaaaaagatcaagatcaatatacacaccatcaggttcttgttctagttagtacatagctattacctcacatattcaaaaggggagaaaaagtcagtgcccaactaaaattctaggacccaagtaataatgccaacagaaagaattgcgattgtcatacttcatcatgcataaacaaaaagaaagacaagtccttgataaagcaaagagaaaacctaaccgaactaattaatcgattgaaatagtaggataagagaaaaaggagcttactcaaagacgacaataacctggcacaagttttctaccgcttaattactcgccttccctttcatgatattgtttgatttattgatgctaacatcacacaatcaaatttaagcgatattaataaggaaaaaaagggacggctaatttaaagtgacactcttccaaacctacctgctttagagcaatgcaaccaaataataaattgctatgaagaacctaatctagctcaaaatattggaagcacacaaaaccccccctaaagatcctgcatatccaaatccagcagattttgagtgcatttgtgtggagtagctactactgtacctggagtatatctaagcaatcaatataatcgttggttaggtttagaagatcatactatgtctcagggattaattggaagcagtccccaaaagtaaaagccaattgtcttttagtagttgttaacaatagaataattttcttgagtttccttataggaatggcatactgactttaatttatttttcaaactcttttgtattgaaaattcttgttcataaaatgcgacgcacattttcattgaaaggaataccctatttcacagtctaggatagaggagtaacaattttgagtgatcattcctgctccaccctgaaaatgatactacctccatattttaatgtatgacgccgttgactttttttcaacgtttgatcattcgtcttattcaaaaagtttatataattataatttattttattatgacttgatttatcatcaaatattttttaagcatgacataaatatgttcatatttacacaaaaaatttgaataaaacgaatagtcaaacgttggtcgaaaagtcaatggcgtcatacattaaaatacggagtgagtagtatttttttttctttcagtagagtatctccagttcctttttagggcaaaacttgcctcttcaaaaagtagcaccctaaaacaaaaaccttactaaaatacttactccaaaacttttttctcgttgatatatgccattttacatttccatgactctaatgaccgaatgaggagagcagtagggtgcttgtgcagagtatatatggcccagagaaacgggtgaaatctgggcctaattgtttgagcggtagttgagcccacctggcccaaattgttttcctttcgagagagcctgagggctacaacttgatgggccgaaaccgacattaatccagcagcccagtactattttgtggatgggcttatgggcccaaaccgtcgtctctcgaacgaaccgacctgagcttagcttatgtcgtcatcttttagagttagggctcgcctcgattcgttccgcgagaaaatccagtccctcccatcccatcgccgccttttccttttcctccaaatccaacctcctcttctcccccttctccggcgcggcggcggcggtatcaccggaggcgccgaccctccctcggctcgccaaaaggtaacccccagctatccctctcctcctcctcccgcttctcctcccgcttccgcacgaaaaaaccaactgaaaaaccctatcgatctgcagccatggcgaacctgggcggcggcgccgaggcgcacgcgcgcttcaagcagtacgagtaccgcgccaactccagcctcgtcctcaccaccgactcgcgcccccgcgacacccacgagcccaccggcgagcccgagacgctctggggcaggatcgaccccaggagcttcggcgaccgcgccgtccaggccaagccccccgagctcgaggagaagctcaccaagtcccgcaagaagaaggccgccgccgctgaccccgacgacctccaccgccgcgacgccaagcgcaggcgccgcgccgcagccgcccagcgtgaggtcagcgtcctctcgctcaccgacgacgtcgtctacaagccccagaccaaggagacgcgcgccgcctacgaggccctgctcagcgtcatccagcagcagttcggcggacagccgctcgacgtgctcggcggcgctgccgacgaggtgctcgccgtcctcaagaatgacaagatcaagagccctgacaagaagaaggagatcgagaagctcctcaaccctatctccaaccagatgttcgaccagatcgtctccatagggaagctcatcacggatttccatgatgcctcggctggtgattcagctgctgcgccatctggtgatggcatggacacagcgctggatgatgacatcggcgttgctgttgaatttgaagagaacgaagatgacgaggagagcgatttcgatcaggtacatttggtgtttctctttacaattcttttcctgcatatggctaaagcatgttatgctagtgtttacttacaaggccttcattatttctcctcgtcaggtgcaagatgatttggatgaagatgaagatgatgacttgcctgagtcgaatgcccctggtgctatgcaaatgggtggcgagttagatgatgatgatatgcagaactccaacgaggggctgaccataaatgtacaagacattgatgcttactggcttcagaggaaggtctcgcaagcatacgaagatattgatccgcagcacagtcagaagcttgctgaggagatcttgaagataattgctgagggtgatgacagagatgtcgagaatcggcttgtcatgctgttggactatgaaaagtttgatctcattaaactgctactacgcaaccgactcaagattgtttggtgtacccgtttagcaagggctgaagatcaggaacagcggaagaagattgaggaagatatgatgggtaacccaactttaactccgatattggagcagctacatgcaacgagggcatctgcaaaggagaggcagaagaatctagagaaaagtatcagggatgaggccaagaggcttactaaaagcgaaaacactggcattgatggtgcgagggatcgtagggcagttgaccgggatatggagagtggatggttgaaaggccagaggcagctgcttgatcttgacagcctgtccttccaccaaggtggtctcttgatggccaacaagaaatgtgagcttcctccaggatcattcagaacccctcataaggggtatgaggaagtccatgtgccggcgctaaaagctaagccatatgaaactggagagaagattgtcaagatatctgatatgccagagtgggctcaaccagcttttgctaagatgacacagctgaacagggttcagagcaaggtttatgagactgcccttttcaaaccagataatattctcctctgtgctccaacaggtgctgggaaaaccaatgtggctgtgctcacaatccttcagcagattgggttgcatatgaaggatggagtgtttgacaataccaagtacaaaattgtctatgtggccccaatgaaagctttggttgccgaagttgttggaaatttgtcggctcggctgagtgcatatggtattactgtaagagagctcagtggagaccagaacctgaccaaacagcagattgatgaaacacagataattgtcaccacacctgagaaatgggacattgtcacaagaaaatcaggtgacagaacctatactcaaatggtaaagcttctaatcattgatgagatccatctacttcatgacaacagagggcctgttctggagagcattgtttctagaactgtccggcagattgagacgaccaaagaacatatccgtctagttggtctctcagcaactcttccgaactatgaagatgtcgcggttttcctgcgtgttcgctctgatggcctcttccatttcgataacagctacagaccttgcccccttgctcagcaatacattgggatcactgtgaggaagccactacagaggtttcagctgatgaatgagatttgctacgagaaggttatggcatctgctggaaagcatcaagtgcttatattcgtgcactcgaggaaggagacagcgaaaactgcccgtgccatcagagatactgcattggctaatgacacgttaaaccgcttcttgaaggatgatagtgcaagccaagagattcttgggagtcaggcagaactagtaaaaagcagtgaccttaaagaccttttgccttatgggtttgctattcatcatgctgggttggcaagggtagaccgtgagcttgtagaggagctttttgccgataagcatatacaggtccttgtctcaacagccacccttgcatggggtgtcaatttgcctgcacacactgttataataaagggtacccagatttacaatcctgaaaagggtgcgtggacagagctgagtcctctagatgtcatgcagatgcttggccgtgctggcaggccacagtatgatacacatggagagggaataatcctaactggccacagtgaattgcaatattacctgtctctaatgaatcaacaactgcctattgagagtcagttcatatccagattggctgatcaattaaatgcagagattgttcttgggactattcagaatgctcgggaggcatgctcatggcttggctacacctacctctacatccggatgctccggaatccaacattgtatggtctaccggcagatatcatggagactgataaaacactagatgaaaggagagctgacttggtaagaggataccatacttatattctatcttctatagagttgttatacttatcccttcatccttagcgtttgttcacatattatccttgtacatatgcactaattgccacaatgttctctaattcattgtccaagttttctttaactcttatctgaatattggtgttcaagagttacatgaatctaatatagcatttactgaggtactcaattctcagtattgaaatgctgtttacagaaagttaattccctcacactggaatagggtatttttaatcatcactagcatcatagactcattagcatgtactagtgtataatagaaataggataatggccttggattttatttgtccgaatgctctttgcagtgtagctttatattttgttgctggacacttaatagttgtatatttgctctctttgaccaatagcaacatgatacaagccagtctcttctattgaaatgtatgcgcatctttgactaccgatgtagcattgtgcatcaatttagcactcgaactacagggtaaggtagcatgtaaaaaatgcgtaaaaagtgcgcaacttcaactcattatttttgttggctgaattccatagctgaagcatctagttgacaattgattcatgcttgtgttgttcatattgtatggtttctctgtatgctctcttgatgtttaactgctttgttaccccttctagtccatgctcaatcaattgttgattcttgtacttctgtgcttctgcaggtgcactctgctgcaaatctgctcgataggaacaatttgataaagtatgacaggaaaacaggatacttccaggttactgacctaggaaggattgctagttattactatattagccacgggactatttcaacttacaatgagtacctgaagcctacaatgggtgatattgagctatgtcggctcttttcactcagtgaagaattcaagtatgtcagtgttagacaagatgagaaaatggagctggctaagcttttggatcgtgtgcctattcctgtgaaagaaagcttggaggagcccagtgcaaagatcaatgttctgctgcaagcatatatttctaggctgaaattggagggtctttcgcttagctccgatatggtctacatcagacaggtaacatgttctccctgctgaataagcttcctgaatttgaattgattgcttattattatctgttttatgacaattgattgcttattattatctgttttatgacacagagtgctggccgtctcttacgagcgttgtttgagatagttctgaagagaggatgggcccaactagcagagaaggctttgaatctttgtaagatgatagataagcagatgtggaatgtccaaactcccctgcgccaattccctggtattccgaaggaaatcctaatgaaactggagaaaaaagaattggcttgggagaggtactacgacctatcatctcaggaaattggtgaactaattcggttcccgaagatgggcaggcaactgcacaagtgcatccaccagttaccaaagttgaatctttcagcccatgttcagccaattactcgtacggttttgggttttgagttgactataactcctgatttccaatgggatgataaggtacatggatatgtggagcctttctgggttattgttgaggacaacgatggcgagaacattcttcaccatgagtacttcatggttaagaaacaatacgtagatgaagatcatacactcaacttcacagtgccaatatacgagccactgccccctcaatactttattcgtgttgtatctgataagtggcttggttctcagacaattcttcctgtctgttttaggcacttaattcttccagaaaaatatgctccgccaactgaattgcttgatctgcagccactgcctgttactgcattgagaaatgcacgatacgaaggcctttatagtgccttcaaacatttcaacccaatccagactcaagtgttcactgttctgtacaacactgatgacagtgttttggttgctgcgccaacaggcagtggaaagaccatctgtgcagagtttgctatactaagaaaccatcagaaggctgtatctggtgagagcaacatgcgagttgtgtatattgctcctattgaagcccttgcaaaagaaaggtacagggattgggagcagaaatttggagaatttgctcgggtagttgagctaacaggtgaaactgcagctgacttgaagcttctggataaaggggagattataattagtactcctgagaagtgggatgcactctctcgccggtggaaacagcggaaacaagtccaacaggtcagcctattcattgttgatgagcttcatctgattggatctgaaaagggacatgttctggaagtcatcgtctctaggatgaggcgtattgcaagtcatatcggcagtaacatccggattgtggctctttcagcttcacttgcaaatgctaaagatctcggagaatggattggtgctacctctcatggccttttcaactttcctccagctgtccggccggtgccattagaaatacacattcagggtgtggatatagcaaattttgaggcaaggatgcaggcaatgacgaagccgacatacactgctattacccaacatgcaaagaatggtaaacctgccctggtgtttgtgcctacacggaagcatgcaaggttgactgcattggacttgtgtgcatactcgagtgctgagggtggtggaacacctttccttcttggttcagaagatgagatggatgctttcactggtggtatcagtgatgaaacacttaaatatactctgaaatgtggtgtaggctacttgcatgaaggtttaagtgatctggaacaggaagttgtaacgcagctgtttctcggtgggaggatccaagtgtgtgttgcgagtagcactgtgtgctggggaagatcattgcctgcccatctggtggttgtgatgggaacccagtattatgatggccgggagaatgctcatactgattatccaatcactgatctactccaaatgatgggtcatgctagcaggcctcttcaagataactcagggaaatgtgttatattgtgtcatgcgcctcgcaaggaatactacaagaagttcctttttgaggccttccctgttgagagccatcttcaccacttcttgcatgatcatatgaacgctgaggtggtggttggtgtcatagaaaacaagcaagatgctgtggattaccttacttggaccttcatgtacaggcggctgaccaagaaccctaactactacaatctgcagggcgtgagccacaggcatttgtcggaccatttatctgagttggttgagactgtattgaatgacctagaatcaagcaagtgtgtggctatagaggaggatatgtacctgaagcccctcaaccttggtctgattgcttcgtactactacattagctacacaactattgagaggttcagttcaatgctaactcaaaagactaagatgaaagggctcctggagattctagcctctgcttcagaatatgctgagcttcccagtcgccctggtgaggaggatttcattgagaagcttgttcgccaccagagattttccatcgagaagcccaagtatggtgatccacatgtcaaggctaacgcactgctgcaagctcatttttcaaggcacactatcttagggaacctggcagccgaccagcgggagatactcctttctgctcatagattgctccaggcaatggttgatgttatctccagcaatggatggcttacgcttgctcttaatgcaatggagctgagtcaaatggtgacacaaggcatgtgggatcgtgattctgttcttttacaacttccacatttcaccaaggagttggcacggagatgtcaggagaatgaagggaggcccattgagagcatctttgatctggctgagatgagcatcgatgagatgcgggatctgttgcagcaatcaaaccctcagctgcaggatatcattgaattcttcaagcgtttccccaatgtcgatatggcttacgaagttcgcgagggtgatgatatcagggctggtgacaatgtaactgtacaggtgaccctggagcgtgacatgacgaacttgccttctgaggtggggccagttcatgcccccaggtacccaaagcccaaggaagaaggctggtggctggtaattggtgatagctctaccaatcagttgcttgcaatcaagagggttgcacttcagaagagggctcgagtgaagcttgagttcaccgctgcttcagaagctgggagaaaggagtacatgatctacctgatgtccgattcttatctgggctgcgatcaggagtacgagttcaccgtcgatgtcatggatgctggaggggattgatcccaaggccagaaagaggatgaaagctttgcccagcccccaggtgtgtatggagctgggtggttgcttgtacgctcgtagcaattcctaatgtcctatccacacttgtatgtgtttgtactcgtttttatctttagccattttcttagtgtaactgatgctcacctctgctgctacctgtggtcatctttggggatctttattagctagcctatggctgtgcttcttgtgatcatccttcttattgtgtttttgtcttcctgtttcatcaaagcaagtcactaacgttttgattcttatctatatcattttatcatgccgttggtttggcccgtattaattgttacatctcatatgatactctgctcatagattgctccagtccagcctctccaggcaatgcctgatactccagcgtattattgttgagcaatcttggaaccggtttgttttggaaacaagtagtgatgtagtgtacatgtgctgcataatgctaaatgattttaagatttgatatagtccgtgaataatggtggtcataataaaccactactgcatgactccctttggagtccgggtccacttgttcatacatccactgttgctaaaatatgcttttggacaagtcagagagacaatatacatacaaactcaaaactctcctttatctgtctgtaatatccacacttttatgtgtttgtaatcgcatttatatctagcctattgttttttttaaggctcggaatgtaacctttttcaattcgaaaatcaatttttaatgttgaattcaaacttttgacagggagaaaaaaaagggatcccccggatagattcccagatgacgtcatctcacctgccgtatgtgatcttctcacctgcatggcattgcagagtacttcatttagttttgattctcgttgcggttgccagggcagtgggtgggtcccgcgctgctttgtcgtcctcgccaacgtgagggcgaggcggtgagaggtgagggggttctccgacgatcgcttgctcgctacggcgcgtcgacgccgccaccctctccgcgtcctcgccgcgcgccgttgggcttctccgcgcgccattcggtccaagcagcgcgacatcctacgccaccgaccaccggtcgcaagcatcggccccctctccggtctccgcgtacgtcctcgctgccgctgcagtcatggcggtgttcaagatgatccgccgtttggtggtctcctcgctccctcacgcccggattctcaccggcgcctcctcgtcggcgacgcccgcggcaactcctcctgcttccaccgtcttcttcgtcaacacctcgccctcttcagcggcgacgctcaccgccagcgcctcttcgtcggcgacgtccgcggcgacctccctcgcctccgcgacctcccgcgcctccccgtcggcgacctcccgctcctccctcgtctccatcgtcaccgactcgctctctgcggcggcgactctcaccgccaacgcgttctcgtcggtgacgtcggcggcgactcctcccgccttcctcgcctccgtcttcaccaccgcgccctctacagcggcgactcttgccggcagctcctcctcgtcggtgacgtccgcggcgacctcgcccgcctcactcctctcggcatcttctctgccctggacgtcgtcgtggccgctaacaccgccaccgaacagggcccttgctgtcttctcaccatcgccgcgatctacttggacaagatcctcggctacatcgatgacttccatgcggctccagaacaaggcgtattgcagcagcagcagcaatgcaccaacacaggatgaacttcctgaagatgtgatgtaagtttgtatgtttatacagtctttaacacttttgcttatgtgcagtttttcagtgtgaaatacttcattctgtaattctgcatcatgttcaatgcttcttattagttgggaatagtacacgtattgctttgcttgccaatggttcatattcattacttgtgtgcgaatggagtataacttagtgtatgaccctttcccactttgcttcatgtttgatgcttaactgtattcctcataatagttaggaatctgtatctatagtagaagtgttacttgcttaatatttcagattcagtacttgtttatgaggaactgaagtataagaactctttcctgctttgcctttgcttcatgttcgatgtttacatgtatgctgatatttcttatgttagttgggaacatgtatctatagtagaagtgttgtttggttaatacttcagattctatagttgaagtgtgacttgcttaatatttcagattcagtactcgtttatgatgaatcgaagtataagtttactgtatgactctttcctgctttgcctttgcttcatgttcaatgcttactctgtgtgctagtattcatctccgatcattaagagagaaaaagttattgtttctgtttgaaagcaagtttgtttatattgaactgaaaatagttaattaatttgcagaaaatacgatagcattctacaatcctcccgttctgctattccatttgtgcacccgatagagtatttgcagggtcatgcagtgttctttagtattccaggggacgtgcaacttctgggtgaaacttacctaccaaaggggcaaatgctgatttcaccgaaagaacaactcatgttcacaggcaggggaagtgtgtttgcgcagtcatatcttgaggagatttatgtgatgcttttacaaggaaaatgtcttcacaaacctcttagcatggatgacatggtagtcagtgcccttggcagagttcatttgagagatggaattcttatgaggcctatagctgagtctcgcagagctgcaatcatcaattctacctggtttgaagctatgaagctcctgaaacaaatgcttgcgtacgcaaatccacataatttcgatcttccacctgacttcctgcacctttgcaatactatggaaaaccgatatgaaccaaagggcatgaacataccttatcatgcatcattgttacccctccactcgaggcagcaggctctacttgatgcatttaacttgctgacaaacaggatgaacttcagatatgcatcttggatttcttgtgaattgcctcataggacggagtggccgcaagttctgcacgggaacaacttcctgcgacagtggttccgcgacaaacaatggctgaatgatgatggtacaatcaaagtacccactggtattgagttcttgtgggcccacagagtgctttgttgtcattcggatgactatgccaggaagggtgtttgcatgtacacttgggaacagctgcaccttctaatccatggtaaaaatcccttggttctacctgatctgcacctgaagctcatgagggcaggtcttctccacttactggacccggcaagattatttgcctataccaccaagagagcagaagattttcccctaccccacccaacatcctgaaagagtccatataggcactgatcggcctagcaacgatgagggaggatagcaagaatgctaactgggaatggttatgtttgaaatgtttcttaggctcttaacactgtttttgctttgcacttctggtatcattttcgtttctgttatcacttttgttttgacgtaagtggtgcacaatattactcattctgatttgtgaagaaaaactcgattcaaattgtggactgcatgagtgttggaccatgtaaattgtgctgttgcgtgaccatgaccaatgaaccatgtgtttggcacttgaatcctatgctaccaaaatttcagttgtacgtagagaacaaatagttcgattacaatgtttcaaggtgattgaagaattacagatactcttgtcatcacttgaagagtctgctcttattcacagccattttttcttcttcagatattgtatgtatacagaaggacatgatgcaatatactgagagcaaataacaaaaattcagtaattttctgaaatgggaaaggaaaaacaaagcttcagcagtctaaattcatgcctagcatgcacatgcgagctcaacagaagccacactgacatctgcgttgcatacatgcctcttcgttctaatgccaaatccaatcttgtaagcatgtacgatgacaaatgggcccatctgtgtctataaaatatggacccagtatcattacagtaaaggttaatgtttgcagtgttattattgtaaatctcccggagtatgttgtatgactgctttgcatcttgttcagaacgaaggatctgttggttgcaatactccatgctttgcatcaagattcggtctcactctcgtcttcctccctctcggtgtctccgccccgccgtcaccgatctcccgcctcccgcctccgccgccggcgactgctcccgcgcccgctccccgtcgttgcttccgttccggtaagctgcctgggactgtactagttgaggttgctagtccgaatccctgacgcgcgttgctcgctcttctgggcggcagcagatcgatttccttcaatggcggcggcggaggaggggcagtgggtgctcatggccaccggccgatctcccaccaacatcgccgtcatcaagtactgggggaagagggacgaggcgctcatcctccccgtcaacgacagcatcagcgtcaccctcgaccccgaccacctctccgccaccaccaccgtcgccgtcagcccttccttcccctccgaccggatgtggctcaacggcaaggtcctcctcctctctactcttccatctctctgctctgctgcttcctacttttttttttgttgttgcttcgcattgatgcttatgctttgttgtcccctctgaataatgggactctgttcatcaaactgatgacaactgctgcttagatctgaataatgggattcggttccagtgttcttcccatctacaaattctacaggcagtggagctctagttttttttttggttattttaataagaatcacatttctgatttcatatgcactagcatctagtatgtgtttctagctttgttgctgttacagtcactgatcctatctaactacgaactgtcaaatcctatatttacacggtgtgaaacttaaagctgtgatctaccaccacgctagaccttaagggatgatcactatgtcttaagctagcttttggtttggaattgtgcaggagatctccttgtcaggagggaggttccagagctgcctcagggagatccggaagcgtgctcaagatgtcgaggatgagaagaaggggatcaggatcaagaaagaggactgggggaagctacatgtacacatagcatcgtacaacaacttccccactgctgctggtttggcctcttcggttgctggcttggtttgttttggtaaagtctattacttctgatatcaatgatatttccctacttattgtctaaaatattttgaaatttgataatgccacccaagatcagacaatggttcaatcatcttattggtgatttttttttaaaaaaatctaaataggtgaatggaagcacatatttattacctgattgctttttgtagttttcacccttggaaatctaatgaatgtgaaagaagattatggtgaactttcttccatagcaaggtattttgttgctagtactccatctttactgatcagtatgctatggaactgcttcttttctccttctggtataactgacaaattcaaatgcaggcaagggtctggaagtgcatgccgcagtatatatgggggattcgtgaaatggtgtatgggaaaagtgagttatctgatgctatgacagaggaacagccttggtgaaatttatcgcatatcctttctagcgagtaatgataaattttatactatacttacagaataatgatggaagtgacagcatagctgtacaacttgctgatgaggcacactggaatgatcttgttattatcatagcagtggtatgtgatgtgcatttaacatacctcttactgcgtataatctgttgtagcattactactcctggtgttgtggcttcacaaccagtaaatttgaatcagatagtaactcttagtattttatcatgctttttaacaacatttactaattatgtcatgtctgacatcttcaaaataattgaatgtccctgtgtaaaataggtcagttcaaagcagaaggaaacaagtagcactagtgggatgcgagacagtgttgaaacaagtccccttttgcaatatagggcccaggtgactgttttgacttgtacttttgttttggctgtttaaaattttgtgattaaatttctcatgattcatagaggaagtagagttgggcagttggctaccccctgcaagacgatgttaattaattaactctggagcataattttgtgggctgccatgtcaaaagctagtctcgctgcaggcttgcaacgagtagtatataagaggcctgcaggcagttagatagcgagtgagcattgaggcgtacgagtaggatgattgtgaagatgatgaagccggtggtggcgctgttcctagtgaccgtcctcatcgcctcgcgtgagtcatcttaattactactactaattagctagtagctagtttctgtgcttaactattagtttcagttatcaagttagcatgaatgcatatactgatatacatgcagcaataaaagaagaagatggaaaatactattattgttattaggaaaaagtacgttttacccccccgaactatcacggtcgaccgaattacacccttaaactcaaaaaccagacattctatatcctcagctattgaaaccggacaaataaggccccttaacactgttttgagtggttttgacttaacctcgcacacgtggcgccaacgtggcaatctaaccagcaaaaaaaataaaaaaaaacatggcccacctgtcatacctatcctcaaaccaatctgccaatctctcaaccattccatctctctcacgcacgcgctcgggcaaggcagcgggtgaccggcggcggaggtggagctccccgggcggccgggtgtctgaggcagagcgggcgaccggcgacggagacggagctccccgagcagcgggcggtggaggcggagctcccctggcggtgggcggtgggcagctgaggtggaagcagagcgggcggccgacggtggaggcggaggtccctgtgcggcgggcgtcgtgccgctgaggctgaggcggaggcggagcgggtggctggcggcggaagcggagcttctcgggctgcgccgctgcgggtggcgggcggctgaggcggaggcggagtgggcgaccgacaacgccgtggtgaagggcggcggcgatgcgggagtaggtgtgtgtggtgtgcgggggatggcggcgcgcggggccgggcggttggcggcggcagagggggagctggagccgacgacggctcggcgggcagcgggctatggcgtcgccgagaggtagcgcttctctgcctctctctccctctctctctcggtgagcagaggaggcagctgtggcgcgggggcggaggcagctgcggccggagggggcggaggcagctgcgggcggcgggcgaggagtcgaggacggcggccgaaggcggcgagggagatggcgtgggagcagctgcacgacgaccgacgagccgccctccgtgcgctcggcatgggcctcatcatgggtggcgacctcctctgcaccgagctggagtaagccatcgcgcgggtggtgtacgaccgtagccgcggtggcggtggcggtggcagtggcgatggcgcgggagagaccgtcgcctccgtgccgcccgcctgctgccgcccaccgcccgcctgctgccacgcgcaagagagagaggaagagttagagagagaggaagatgagagagaggaggtgagagagattcggtggccggtgcgacgagatccacgccggcggccgctctccatggcctctagccttgagctccgccgcccacaccccttctgccctctctcactctctcgtataatcagaataggtgcctgacaggtagggcccaccatttttattattgttatttccatgttggactgccacatcaatcaaactagtgccacgtgtgcgccacgtcaaaccaaaaccaccccggattgacttaggggggtaatttggccggtttgaaaattttggggtgtaaaataactggttttagagtctaagggggtaattcgaacgacccaaatagtttagggggtaaaacgtactttttccttgttattattattgcaaatgcaaacagctatagctagctagaaaatgaaaagaaaagaaaagaaataagatgggatttggaaatggaaatgcagatggtgcgatgatgcagtgggcggcggaggcggagacgtgcaactacccaatctacaagtgcgagggggtgtgctacaagagaggcaagtgcaacgcctgctgcaagcagctcggcttcctgggcggcatgctctgcctctgctgccacgaggacgacgaccagccgccgccctcctccactcacctccccgtcgccgccatcgatcacgatcacgatcacgccgccgacatgccatgatcatcattcatccatctatatattgcttatttgcatgcactgcagataccaatctcatctcctactcccatgtatagttggagtacatatatatgttggctggatcatgagccaccggatgtgatgtgagcaattaataataataataataataataataataataataataataataataaccatggattactgatgctgcaaataatattttttctgctctgctgcaaatatgatttttgagatacaatgaacaacacatcaggcaggcgcaggcgcgcaatgagatggaactagttgaataatttaattttgtagagcgaatctatttggaatatctgttgcaggtgcatcactccggtcaaaaacatttcgggcccttttgaattgtaggaataaaaaaacggaggaataggaaaaacataggattctgacaggaatgtaaatgtaaaacagaggattgtaaaacacagaaaaaacacaggaatgattgtttgattggaccacaggaaaaacacaggaatcaaataagagagatagactcaaaggatttttatcaagaggttggacctcttgctaagtttcctccaaaacctatatgcaacaagccattccataggaattttgtagaatttggaaaacttcaatcctttgaatcaaagggctacataagaaaatttcatataggatttcaatcctataaaattccttcgtaattcatttgattcaaaggggcccttcatctttgggatgttgttgctgtgctaactgctaaggaagataatatcatcttattatgcccaaattttacaacactttgccttcttaattgttattaaaatagctgcagccaaattgtagtactgtaagaggaaatcatcatattattagaaggaagcaagaactttttttgacaatgtgattagttggcccctgttctgtttcccctttttcttttcgggtgatgactggtttggttgtcactttgccttgacagcttaatgttaaacaattataaccccttttctctcttagtaaaatttggtcggtcaatccttcggtcgaactagcaaaaaaaaaagttttcattttccagaatgaaggagcatatataataagaggacagcctcttaataaggctgtgaattccttgtctgttggtaatataaacgaatggccgaatggagcatatacagcatttcgattattactctattacaaacgaagaagattattattgtaatctcgctcgaaatgaaaaggaaaaagggaaatatagctagttttaccggagagaggtgtaagtaaattaaaagactcgagagtaaccacgaacgaaatcgccgttttggaatgcgtagcgtatagacttgtgcacgacgacggcgtcgtcactgcccaccacatcaacgccggtgagcagcaagaacctgtcgttcttgcttttttcgccggcgacgcggaagaatggatgaagtgagatgttgtgttgctcctcctcctccatgaacctggcgatgcagaacctaccggagccgaggtgcacggcgtaggtctccatcagtaacgatcgcttgggcggcgccgccgccggcagccggtctaggccatccaaccagcacctgaccatcacctgcgcatcgtaggaacagcagagatcggagagatcgcaggaacagaggtacagccccagcctcggagtggaggagagcccaaaccattgcccgtgctcctccacgtacttctggagtatctcgcagttatctcatcggaccagatcgagatgttgtgttgggcccatcgtccgccgaaaaaagttttatgcgtgtcatatgagacatggtacatatgaatatatatttaaaatatgtattattaaatatagtctaataataaaacaaattatagattccggctataaactgcgagatgaatttattaagcataattaatcagttattagtaaatacaacgttgtcaaatcatgacgcaattaagcttaacatttaatactttatacatatgaccaaacattcgatgtgacagcgtgaaaatggctttatacaaaatttggcatggagaactgttaacgctaaaatttgctaagaatttttaagtacatttagttaacgaagtatcacatgacttatacaacagagatcgagtttgagaagaagttaaagaataccacgacatggctggtaagttttgtatttatgaatgtttttgttatctttacaaaagtttgtatcgtgtttaaatagtacttttataggtctatgtgtataaatatatatacccaggattcctataatttatcttacaggtaaatacaattactcttggcgcattgccatcattcattccgaggtttttatttatcaccggtggaacttggtgatgaagatgttaggtcccgatttttcgataggtattgataaacagtcaatttgggcagagtcgtgacacaactcgatccggcttccgaatgagcatgctactcaacccctcaatcgcagcaccacgtctcctctagttatcaaccgtgccgaaactcggttgacctcgccgataaggctaatccctgcatgcaaatcgaataacacaagcaagaacaagatagactgcaacacaattgcatatgaatgattaagcatacaaatttggagttctacaaaccgatctagtggcgaaactgttcttgacagattaatctaagcaaaacccacactctaaacgatgacggctactgaataaatatgattaggaacgtcctagggttgccctatggcacacactctttggcctaagcccacgacacaattacaaggcccaaaacccaaatcagattcagactggatgaggtgtgtggtttgttttgcagattcccggcagctcggtaggaattttgacgtggaaccaaaatcatttgaaagtagactccataagctttccagcaagtactcatgggccccgaaattccttctagatcagcggctaggtccacttgaagttgatgctgtcaggaggcccgaatccgaatccaaaacgtgtagaactttatctcttgtcttatatggaccaaaagtgacgtggtgagatggaagtgaacttggagaaagtcttggtttggtcccaatcaaacattaaatttggcttgatgaagctatgctctgcaacagacaatcacacaggaaccaacatgaggggatggatctaagatctgagtatatttcatatggaaaatcgaaaggggattgacaagcaattcaacaacctgaaacaactcatcttcatgccgatggatgttgttctggacttctggtataaaatctatagcatccaaaacattagtactcctcagcgttaaccaaggcgagaggggaacatgcgacaatagagagaacaccgagttgtgtggcagagtaggaggaggtgagcgccagtggcaagagacgatgggggcgaaggggatcagtgaggggattgacacggtggaggtaaggcaagcaggctatcggcgctagcgctggagtaatgcctctatcggttccctgctctctcatgatttgaggcagctagaagcaagagagtatcggcaatcaacccaactggtggagtgcggcggcggcagggaaggacctagccgtcaggaaccaccacgatgccagcgggggcagtggagtgtcgcggcggcagggaaggacttcgccggcaggaaccaccacggcatcggcaaggggaggctgcggtgtagtgcggcggaggtgggaagacctcgctgtcgggaaccaccacggcgccagcagcggttagagaagaagtcggctccggcgagggcatcagtgggcttcggtggcggcgaccgttggggacgacagcggctcctgcgtgggcaggtggagtgcgtggcagcagtggaaggggacgacctcggctccggggaccgcgactagggaagaagtcggctccagagaaggcagcagaggagcgaggcggcggcaacagtacatgtgaggaggagcgagcagaaggagccagtcacgcctagagagggtgaggcgtagtcttcacgcgtggagattatgagatcatgcggtggagattggtggacggtacggattatacttgatctacgaatggacggtagagatttagcctataggattagaggggtaaactcattctttttatattagtatagatatagatatagtttatgaatggcccttgaggccttggacaattcatgcatatgcttgttaaaccaacatggcaattgatctaatggctccaatgtgttagatccaacggctctaatgcgcagatgatgtggcctaacgtggagcttgttttattggagttaatgcttacagtgggtaccaactactccctctgtttctaaatatttgacgtcgttgatttttttacacacgtttgaccgtaagtcttattcaaaaacttttgtgaaatatgtaaaactatatgtataaataaaagtatatttaacaatgaatgaaatgataagaaaagaattaataattacttaaattttttgaataagacgagcggttaagcatatttaaaaaaattagcggtgtcaaatatttaggaatgaagggagtatatagaaagaaatgatagttagaagaagaaaaacgataacgtagctgatggttacaaatgaacgtggtttgaggtggggagcccccccccccccccgacgcagattcagtgagattctcggtgacactgagtcactgacatgtgggaccccccggtgttcccttaaaaaaaacgtggttgagtatcctctacctgtaacgtgacctgtttggctttttccagctgtcaatgatcccttaaattgagcttttaaacatggcatgaattgctttcaattcttaccgccttttcatttgtaagcaccaccggaacattagacgatcagtatctcaccagtataaacccgctcactttctgctgcgctccgttcgggtgctcgtcacgaacaaatttacatgtacatcgtgtcttctttctttttttgacattatgtcttctttttttctaaattatttactcagtcctgggttctgattgcgccctgatgggattaataagttttgtttatcttgttaacgctagctagtagcaatatggacaatagaaatgagtccagtaacatgaatggggtcattcccatggagtattgcaagatacagatagttgtcatattgctctcttctgtgaatggattgtcataagctgctgatccttcctgcagcatctacccaagtgaaatctgcatgcacaagttgagatcaacatcgacaagatgagatgactctgaagatgcaggattcctattggattttggagagagacagctgatttacaggggggtggattgactgattcttctcatccttcctggcttgaaaattggaaagcttggagctttcggccctgatttgatccggtcatttctactgcttgacaaactgtggagaatctattccttccagccatatacatccaatttcttgacaatctggaccggacgatccatcagaaaaaattaattcagaatgcaatttggagtgcatcagcttttttggctggcacatcggtgtagtgtatctgtgtgaccttgcaactgtgcaagggtcaaacagcacggccaccagtacttttgttgatgaatgagttattaccacatgacttcgtcaatgctaccccagcaagtgatggaaggaaagatggatgataaggctccagggctcataaatagctgagactgaacattgctcattacagtcttcagatgtaaagcggtgttgttcttcttctctattctgctcaaggcagctgcatccagatcactctactgatcaggaccacgaggatcatctgctggaagaaaacaaggatttgcacattcactatgcactgctgtaattgtatcaaatccaattctaaatgctgaatgaacagttgctgatatgatcctgtcaagaagcaaaaacaagaaactaattgccctctgagacatatatatatagtggacgtgcactagtgttctgataccacaaatcctttggccactggagtcaacttttgatcataaggataacataagtaaagaagattctatttcctacaagagcagcagcagctaagcgcacacattcttttttcctttccagaaaggatataatgatggattagaatattcacagacagtagtacagcttcaggattgctgcaagattagtcacaaaatactagtagtagtagtatcgggcatgttcactttgatgccattttcaaacttaccaaattttggtaaagttaccaaaaaagtggctacatttagtttcctgctaaattttggtaactatataagaaatcatgccaaaatttaccaaaatttgctaaaattttgaccttattaaggttttttttgacatcaaagtgaacaggcccatcatcttactaccatccatggggtccaggacaaattagttgaactaggagtacatacagctgatacagttgtgcagtgaagcggtgacaattgtcaattgacaaagtgccaaggtctcacagctaatccccagctcagctgcctgctgcccccttgatggcctgcacatctctgcccattgaaatctttggtcagcaccatcctctggctgtcaagagttaggtgcagcccgatttgagtcaaccctttgattgcatcaagcaaaggtatactagtatcaatgcccctttatccaattctgcaaagtttcttccccaacttgctgtgtcctgaacaactggatttcattcggtcatcagcttacacggttggttgaatggttggtcaattgcaagctgttcatctgagagactgaaacaaaaccatttggatttgcggttgcagtcttgcagagatcacagaatgttgatctttcaggattagaaacaaaatgcagcacaaatatgatatgagtatatattctgatgaccagaatcagcacacacggttggttgaatgattggtcaattgcaagctgatcatctgggagactgaaacaaactgtttagattgcagttgcagtccagcagaaatcaaagcaagtgcagcacagtatcaggcttcataagaggcaagtgcaacgcctgctgcaagcagctcggcttcctgggcggcaagtgcaacctcctccgcggcatgctctgcctctgctgccacgaggacgacgaccagccgccgccctcctcctccactcacctccccgtcgccgccatcgatcacgatcacgccgccaacatgccatgatcatctcatccagctatatatattgcgttattacccatttgctcgcgtccatgagccaccggatgtgatgtgagcaattaataataactatggattactgatgctgcaaatgattttttttctgctctgctgcaaatatgatttttgagatacaatgaacaacacatcaggcaggcgcaggcgcgcaatgagatggaactagttgaatagtttaattttgtagagcgaatctatttggaatatctgttgcaggtgcatcactccggtcaaaaacatttcagctttgggatgttgttgctctgctaactgctaaggaagatatatcattttattgtgcccaaattttacaacattttgctttcttaattgtcaaaatagctgcagctaaattttccagaatgaagaaggagcatatataataagaggacaacctcttaataaggctgtgaattccttgtctgttggtaatataaacgaatggagtaccattattattattgcaatctcgctcgaaatgaaaaggaaaagggatatatataaatgatatactcactccgtcacaaaacaaaatatagctagttttaccggagactagagaggtgtaataagtaaattaggggatgatgaaattaaaagactcgagagtaaccacgaacgaaatcaccgttttggaatgcgtagcgtatagacttgtgcacgacgacggcgtcgtcactgcccaccacatcaacgccggtgagcagcaagaacctgtcgttcttgcttttttcgccggcgacgcggaagaatggatgaagtgagatgttgtgttgctcctcctcctccatgaacctggcgatgcagaacctaccggagccgaggtgcacggcataggtctccatcagtaacgatcgcttgggcggcgccgccgccggcagccggtctaggccatccaaccagcacctgaccatcacctgcgcatcgtaggaacagcagagataggagagatcgcaggaacagaggtacagccccagcctcggcgtggaggagagcccaaaccattgcccgtgctcctccacgtactcgccgcgccccatgaacggcatccccttttcgccaagctccctccactccccaaccttggaattcgtgtcgaacgagaaggtcccggctccgtgcgccgccgtcacccagagctccttcgattcgttcaactgcaccaccgcggaggcggtgatgtcgtagccagccttggcgaaaggaggcggcggaagagaccgccagtaccagcccatcctggaggacagtgagtcgtcgtcgtcggggagtaagccgtaggtgagagcctcgaagcagccggggttaccggacaagggcaccctctcgatgacgtagaggcggccatcgtcggcggtgaaggagattggctcgatcttgggcttgcacgggtcgggcatgtagcggacggcggcggaggcggcgctgtagagcagaccacggccgtcgacgtcgagggcgagaaggctgtcgtcgccgtcgctgccgccgccactgccgtagaggtacaagaaatcgacgtttccagggccggacaatgaggaagggtggaaggtgatggccggaggaggcaggccgccggcggcgtcctccacgtcatctggatctagtactttggctgcttgccgacgtgctggacatgaaaagagggccgatgcagcgacgcggtacagcttgtacgccgtcgcgtcgccgccgccgccggcggtgtccaccaccaaattcacaaaccgccgcatcatcgtctctgttgatattcttctactcaaaatttttcttttctatataccctttttttttccttttgacaaagagtatcttcgatccggaagaaatcacgcaccttctggagtatgcagtctcgctcgtcctcacgcgataggcggaccgccgaatctcctctcctcggtggcgcgtgatctcgacggcggggcgggatctcggggacggcggggcgagatctcggtagcggcctagcgggcggcacgggaggtcggggagcaatttttttttcttttcttttttttttgttgggcaatatatacggccatacgggacagttatctcatcggaccagatcgagatgttgtgttgggcccatcgtccgccgaaaaaaagttttatgcgtgtcacatgagacatggtacatatgaatatatattaaaaatattattaaatatagtctaataataaaacaaattacagatttcgcctataaactgcgatatgaatttattaaatctaattaattcgttattagtaaatatttactgtagcacaacgttgtcaaaccatgacgtaattaggcttaacatttaatacttcatacatgtgttcaaacatttgatatgacagcgtgaaaagtttttatgtgggaactaaaccgggccttagacaaaatttggcatgctaaaatttggtaagaatttttaagtacatttaattaacgaagtatcacatgacttatacaacagagatcgagtttgaggagttaatattaccacgacatgggtggtaagttttgtatttatgaatgtttttttcatctttacaaaagtttgtatcgtatctaaatagaacttttatcggtctatatgtataaatttgtatatccaggatccctataatttatctcacggataaatacaattactcttggcgcattgctatcattctctccgaggtttttatttatcaccagcggaacttggtgataaggatgttagatcccgatctatcaataggtattgataaacaattgatttgagcggagtcgtgacgcaactcgatccggcttctgaacgagcgtgctactgagccccacaatcacaacaccacgtctcctctagttatcaactgtgccgaaacccagttgaccttgccgagaaggctaatccctgaatatgaatcgaagaacacaagcaagaacaagatatattacaacacagttgcatatgaatgattaagcacacaaatttggagttccacaaaccgatatagcggcaaaactgttcttgacagattaatctaaacaggctactgaataaatatgattaggaacgtcctagggttgccctagggcgcacacccctttggcctaagcccatgacacaattacaaggcccaaaaccaaaatcagattcggactggatgaggtgtgtggcttgttttgcatattcccggcagctcggtaggaattttgatgtggaaccaaaatcatctgaaagtagactgcataagctttccaacaagtactcatgggccccgaaattccttctatatcagcggttaggtccgtttgaagttgatgctgtcaggaggtctgaatccgaatccaaaacgtgtagaactttatatcttgtcttatatggatcaaaagtgacgtggtgagatggaagtgaacttggagaaggtcttggtttggtcccaatcaaacattaagggcctatttggattgctaccaaaaacatgccctaccaatattttggtaatttgaatagtagttgtgtttaatttggattgaagcctattcattggtaatacctaatttagatttggtatcatctagaacattcttcactacaattttacattttagctatatattggtagcaaaccaaatatgatcaatgcaatcttaccttaccaaagatttggtagtgccaaaacttgcctacattttggtactaccaaaaaattgttagggtaacaatccaaataggccctaaatttggcttgatgaagctatgctctgcaacggacaatcacacatgaaccaacatgaggggatggatctaagatctgagtatatttcatatggaaaatcgaaaggggattgacaagcaattcaacaacctgaaacaactatattcatgccgatggatgttgttctggacttctggtataaaatctatagcatccaaaacattagtactcctcagcgttaaccatgcaaggcgagaggggaacatgcgacaatagagagagcaccgagttgtgtggcagagtaggaggaggtgagcaccagcgggacgagacgatgggggcgaaggggatcgttgaggggattgacacggtggaggtaaggcaagcgggctatcggcgctagcgctggacgaatgcctttatttccctgctctctcatgatttgaggtagctagaagcaagagagtatcggcaatcaacccaactggtggagtgcggcggcggcggcggggaaggacctagccgtcaggaaccaccacggtgccagcaggggcagtggagtgcggcggcggcggggaaggactttgccggcggtaaccaccacagcgtcggcgaggggaggctgcagtgtagtgcggcggaggtgggaagacctcgccgtcaggaaccaccacggcgccagcggcgactgaagaagtcggctccggcgagggtagcggtgggcttcggcggcggccgccgctggggacgacggcggctccggcgtgggtaggtggagtgcgtggcagcagcggaaggggacgacctcggctccggggacggcggctggggaagaagtcggctctagagaaggcagcggaggagcgagacggtggcaacagtacatgtgaggaggagcgaggagaaggagcccccagtcacgcctggagagggtgaggcgtagtcgttgtgcgtggagattatgagatcatgcggtggagattggtggacggtacggattatacttgatctacggatggacggtagagatttagcctgtaggattaaaggggtaaactcctcctttttatattagtatagatatagatatagattatgaatggcccttgaggccttggacaattcatgcatatgcttgttaaaccaacatggcaattgatctaatggctccaatgtgctagatccgtcggctctaatgcgctgatgatgtggcttaacgtggagcttgttttataggagttaatgcttatagtgggtaccaactactccccccgtttctaaatatttgacatcgttgacttttttatacacgtttgaccataagtctcattcaaaaacttttgttaaatatgtaaaactatatgtatacataaaagtatatttaacaatgaatgaaatgataagaaaagaattaataattacttaaattttttgaataagacgaacggttaaatatatttaaaaaagttaacggcatcaaatacttaaatacttaggaatggagggagtatatagaaagaaatgatagttagaagaagaacgataatatagttgatggttacaaatggtataatgtaaaacgtggttgaggtggggagtcccctgacccccatgtacctaaaaaaaaacgtggttgagtatcctctacctgtaacgtgaactgtttggctttttccagctgtcaatgatcccttaaattgggagaagactccgcgtcggacatccgatattccaccaaatattggatgccgcgcgtcatcacaccacctgcgtatgcagcatgcaaaaaaaaaatcagtcagacaaatgtcccagttaactaacgagtgaaacatcaagttatttagtgtgaaaaaaaatcagcaactgaaacatttaaaaagtttatgaaacatgattaagatacacgttgaaacatatcgctattacatataaaacaaccaatgttaatggattgaaacatatgtttttctttcatcaaaatataatcatgtgatatcttgttgtaaagatttaattacaaagaatacaacggtgtgatcggatcgtagatcggataattagtttaggagaaattttttttttgaaacttgttaaaatgcatgcatgcatgcatgtatggatgaggtggagagagagagagagagagtagtgcagttaattttagaaattttgtgaaacatattgaagatacacattgaaacatatcgctattacgtatgaaacaaagaaaagtaattttcacaaaactacatgtattttgactaaattatcacaaaactacagatttaagaagttgtatcataaaactacacatttagcaccaaatttatcacaaaactgcatattttaggttaagtatcacaaaaatgtatatttaatattgaacttatcacaaaactacaacttttggagtttaaatccctagcaccattgttatggtggagctataaacattattactttgtgattaaattggttctaaacatgtagttttatgataatttagttactaaacatgtaattttgtgacacttcatcttaaatgtgtagttttatgataaatttggtgttaaatgtgtagttttgtgatacactgagttaaatacgtagttttgtgaaatttactcaacaaagaatgttaatagattgaaacatatgactattttttattacaactaatgcagatgccggagacagggtgttagtagtaacacgcatgacccatggaactcaagtccagctgtgctcgctaaaacccaacatgatgcttggaattttctctcatttattagaaaccttaagtctcaataaagaaacaaggcagtgcgtatgcaatggcacctttttttattgttttcacacattttattacagtaagtatatgaatatttaattttggttacttttacttataacatcaagttagcctattgtttaattggccgcatgtctaccatctgcacacatgacatgcgagatgcacaacatataattcactcagcactgcatagagggcatcacattaggcgcttcctcaaatattagacggtataaaagtagtcaagcacataatatatgatcgacctgagaaaatgaactcaactcaaaatttctgactaagaaataatgcagcaataattcatattttccttcccagagttagaacacagctttcgtattggggcaagaagcagtataaggcatccttcaatggttgagctagtgcactagcttatgcttgtccacctcatacaagagatagcaaaaagtctatctttttaataggttgtctcatagcacattgtttaaaatgctttggtttccacaacccttctcacattttgtttaggagcttagctcttgaagaagagatagtgcactctctctccttatcttctctctcttccacatcatacaaaaactgatgtggagatttatgagctagctgactcacccttgttggaggaggcctaagacaagtgtgttcctgtcagcactaaaaatgccatgagcgaaagcaagccacagcaccaacagcaacagaaaccgagctctgagctccgggttgaagattttgtgtgctatctttcactctgagctcacagcctcaaaagccatcaggtcccatctgatatttctgattagcctgatgaccaactcaacagaagtaaaatacccgtactaaccaggttgtagtcacactcgcatatgaaaaatactccctccgtttcaaaatgtttgacgccgttgactttttagcacatgtttgaccgttcgtcttattcaaaaaatttaagtaattattaatttttttcctatcatttaattcattgttaaatatatttttacgtaggcatataattttacggagggagtaccacataaggcaccggagcatatctttagctgatggttctagcttcccctaccttgctattcagtaaacaaaaaaaaaagcagccaaatagcataggtcgatcactgcatgggcatattcagaaattacatggaaccaatacaccttgtggactggatattagatagcatgcgaaaagtcagttacgtgagaaagaagcatattgaaagaagaggattctagtcaacaatggtagattttattttagtgttgtgcgtctacccatccaactcatttatcagcatgcaaattttgcagtcatttttcaccaccaaactcaactggcaccatcatatgtgaaatgatcacacacataagatattcactgtcggctatctttgaaatacaagttaggcaccactctcccatctaaaatcatatataattatatgtattgtaatccttcagtcaataatggggacatcacattaggcatctccaccaatactcgacagtataaagtaacccagcaatattaaaaaaaaataaagtaaccaagcacataatatgtgattgacctgagaaaatgaagtcaactcaaaggttctggctaagaaacaatgcagcagctgattcagagttagaacgcagttttcatttggggcaaaaagcagtaggcacaatcattggaatatacgaatataagacaagtgtgtgcctgcctgcacttaaaatgccataagcaagagaaagccacagcatgaacagcaagatgatccgcttgtttgctccattcccaaaattcattccactcttggctgtttttatcatctcatgctctctgccattagcaatcagcgatgacactgacactgatagagaagccctgctctgcttcaagtctcaaatctctgatccaaacggatccttaagctcatggagcaacacttcccagaacttctgcaactggcagggtgtttcatgcaacaacacccagacccaactccgagtcatggtgctcaacgtcagctccaaaggcctcagtggttcaataccaccttgcatcggcaatctgagctccatcgcaagcctcgacttatcaagaaacgcattccttggaaaaattccaagtgagctcggacgcttgggacaaatcagctacctgaacttgagcatcaactctcttgaaggccgtattccagatgagctgtcctcatgcagcaatctccaggtactcggcttatcgaacaactccttcgaaggtgagataccaccaagcttaacccaatgcactcgcctccagcaagttatactatacaacaacaagcttgaaggcagtatacccaccagatttggaacgcttcctgagctgaaaactttggatctctccaacaacgccctcagaggtgacataccaccattgttgggcagtagcccgtcttttgtatatgttgatcttgggggcaatcagctcacaggaggaatcccagagttcttggtaaatagctcatcccttcaagtgcttaggctcacgcaaaatagtcttacaggagagatccctccagccctcttcaacagctccacattgacaaccatttacctggaccgtaacaacttagttggttccataccacctattacagcaattgctgcacctattcaataccttagtttagagcagaataaactcacaggagggataccagcctcactgggcaacctttcttccttggttcatgtttctttaaaagcaaataacttggtggggagcatccctaagagcctaagtaagatcccaaccctagagaggctagttctcacatacaacaatttgactggtcatgtgccacaggctattttcaacatatcatctttgaaatatcttagcatggccaataactcactcatcggccaactaccaccagatataggcaacagacttccaaaccttgaagccttaatcctatcaacaacacagttaaatgggccgatcccagcttctcttcgcaatatgtccaagctagaaatggtttatcttgctgctgctggtctcactggtatagtgccatcttttggatccttgccaaacttgcatgaccttgatcttggatacaaccagcttgaagcaggggactggagcttcctctcatcccttgcaaactgcactcaactgaaaaagttggccttggatgccaattttctccaaggaaccttgcctagctcagtcggtaatcttccctcacagctcaactggttgtggctcaggcaaaacaaactttctgggacaattccatcagagattggtaaccttaagagtctcagtgttctgtatttggatgagaatatgtttagtgggagcatcccaccaaccattggaaatcttagcaacttactggttctaagcttggcacaaaataacctctcgggccttattcctgattctattggcaaccttgcccaactaaccgagtttcatctagatgggaacaacttcaacgggagcataccttcaaacttagggcagtggagacaattagagaagcttgatttctcccacaattcatttggtggaagcctgccaagtgaggtcttcaacatctcttccctgtcacaaagtttggacttgtcccacaatttgtttactgggcccataccactagaaattggcaacctcataaatcttggaagcatcagtatttcaaacaatcgcttgactggcgaaataccgtcaactctagggaagtgtgtgcttttggaataccttcacatggaagggaaccttcttactggaagcattccacgatctttcatgaacttaaaaagcatcaaggagctggatctctcttgtaacagcttgtcaggaaaagttccagagttcctcactctcttaagttctttgcagaaactcaacctttcattcaatgattttgaagggccaataccatcaaatggtgtctttggtaatgctagcagggttatcttggccggaaactacagactgtgtgcgaatgatccagggtatagcctgcccctttgccctgaatcaggatcacaaagtaaacacaagtctactattttgaaaatagtaattccaatcgcagtgtctgttgtaatttcattgttatgcttaatggctgttcttatcgaaagaagaaaacaaaaaccatgtttgcagcaatccagtgtgaacatgaggaagatatcatatgaagatatcgccaaagcaacagatgggttctctcccacaaatttggttggtttgggatcctttggggctgtttacaatggcatgttgccgtttgagaccaatccagttgctattaaggtttccgatcttaacaagtacggagcacccacaagcttcaatgcggagtgtgaggcattaagatatattcgccatcgaaatcttgtcaaaatcattactttatgctctacgattgatccaaatggctatgattttaaagcacttgtctttcagtatatgccaaatggaagtctagaaatgtggctacatccagaggaccatgggcatggtaaaaagagattcctaactttgggtgaaaggattagcttagccttggacattgcatacgctttagattatcttcacaaccagtgtgtatccccagtaatacattgtgacatcaaaccaagcaatgttcttttggatcttgaaatgattgcatatgtcagtgactttgggttggcaagatttatgtgtgctaattcaacagcagcgcctggtaactctacaagtttggctgacttaaaaagatccattggatatattgcaccaggtgagagaaattggaaacttatactgatttattgacctgtatgcttcagccatcttattaacttatccaatgttacatggattgtagttttctgccattcacctttcttatgttttcaaatgaaaatgcagagtatggaatgggtgggcaaatatcaacaaagggtgatgtctacagctatggagtgctgttgttagagatattaactggaaagcgtccaactgatgaaaaattcaatgatggtttgagcctccacgatcgcgtggatgctgcatttccccacagagtaactgagattttagaccccaacatgctacacaatgatttggatggtggaaactccgaactgatgcaaagttgtctcctcccattggttaaggtggccctcatgtgctccatggcatcaccaaaagaccggttagggatggcacaagtttccactgaactacactccatcaagcaagcattccttgagctctccagtggaggaaaagtagtgtgaataaacctagctagtatgccctctctttcttatttttccaaattggtagagtgcccactcccctgtggtgcgcaaagctatgttgctttgcaactactgtgtaaggctacttctattaccataactaagtctatatataaacaggggtggacgcagcagggggcaaagagggcttgggcaccctctactgtcggcacgccccctggaaaccatacattattcagcaaccaagtccacactaatacaagccaatctcatggtctcatggtgcgatattgcgtataggctgcagccactcgttaatggcaggcaagcagacacatgtcaacacagccattgatgctagtattggccattaacatccatttttgctaacttttcttagcttagctcatgacagtataaatcaacaacaaaagcttcgatagtgttcataacacaatggtactatttactttaatgataatctcgtattggtctttttaactaacacctccaaaaattttgttctgtgtttccccgcaaaaaaaaaaaaaaacggttctgtgttcgccactgtatataaataacctcatgaatctattatgtgttttggaattaggacagcaccaaatgcaatgttagcaggctgtcgacacacccaagatatggttacaattccacggtagttagtcagcggcacaactcacatcatacaacggcataataacgcgcatagagcaaaacgggcacacagctgcgcctgcccaagtgcgttaatgcgtgctgcgcgctactactttcagaggcatttccacaaacacgccacgcgcgttcgaagtccatacacgaaatcgagcacacaggcatacgcaaaaaagtcagaaaagcagtagcacgctgacctcggagacgacggcgccggcctggcaaacctgccatcttccgccgcgcctgcgccgcccatcgtctcgtcttcctccgccgctccgcggcggcgcgacaggctcgacgccgtcgaagggttggagaaagagagagagggagggtgacaaattgttgatgctgcgcaggccgtcctcatagatctattccattctctctcttaataactttttattactccctcctcctaatatataagtatttttaacataatgttaaattaattttttttactttgacaactaatagcaaaaaaaataaaaatgattaatcatgtaaatttgatgttgctggttttatcattaaacaaattatcttaatatgcaactctttttatttaaaatattttacttttatatactcttcgtttctaaatatttaacaccgttgactttttaaatatgtttacccgttcgtcttattaaaaaaattaagtaattattaatatttttctatcatttgattcattgttaaatatacttatatgtatacatatagttttacatatttcacaaaagtttttaaataaaacgaacggtcaaacatatgctaaaaagttaatggtacggagggagtatattgttggttaaagtaacatcttgaatccccgcaaaaaaaaagtaacatcgtgaagactgtgccaagatctaaaaatgcttatattttgggacggagagagtagcaagtttttttttcctctcaaaaaaatctcatgtaaattccaaacattttttttcatttcgtttatttaaattatatttttttttcatttaaggaagtcatacacatgcgcatatacgcatgaatgtgcgctttaacacatcctataagaaacactcttaatatagttacaattttattgaaggcattttcgtcgtgtgatatttatgagcagcatgatttgaaccagctgaaccaccacatatcggtctttcctagtttcaaatatttttatacgtatgaggaaatagttcatctttgttcaacagtttcagatacgtttggagcaaatttacatcgatttgaatacaaacttttgggcatgaatttctagctatgtgctatatttttttaataatgaaaatgaattatatctccagtctttgcccacggacacacagtaacaagttttagaagaatttaaaatagacgtgatctatgtcctacttagcttggcttgctatgtcctgcggcctggccaacgatacattccgtgtcgacctatggaagcaaaagcaattcagtttataataatgctgctataaatttagggggggggggtggggggtggggagtgaaggaatatttacagatacttttgtgggtacaaacggacgattttcctaccatgttttttcgaggtttcttaattgtcaactttaaaaatagtatcaagacatggtactatttataacataggaaaagttctataattaatatttagacaaataagttcgatacatcttactccctccattccataatataagttttcttatatgttccataatataaggcatacatgcaagcataccattaactatgacatcttctccattaaattattactttttaaatcctctactcccatgttatctaatcctattggatgcatgcattagtatttattaggatgatccaaactacaatatgataataattatttcttagtttttggattaagggtggttgtgtcttatattttggaatggagggaatattagttatatgtatataggattatatatatcttgtgcacccaagatggttaaagggttgtacttgaaaagaaagatggttaaaaggctcttcttttttctacatgtaactacattttctggtggaatacacttacctgtcggcatgtattggttgccatgcacggacgagactgtaggattgtgagacccgtcgggaccactaccatatccaactccatgttctacaaagcaattatatgaattttaaaccaagttgaatttcacgtattagaatatgttatatttttccttaactatataatagctagccgatgttatatatagatatttcctctggttctaatatgcagtacagttaagtagttttacagcttttatacaccttttctatttccattccatgtttgttatctttccaaaatgctactactttcaaaaataattgtctcatattttacagaaaactctgatatattttcttgatggataaactattttttctatgagtatctaaagtttcaagtgaaatgcacttgcctgtagatatgtacgggttgttgtacacgaaagagattggaggctcgtgaatccccccaggtccgccacctccgcttccatatccacctccagcttctacaaaatcaaccactttaaataaatttatgcagtaaacttttaaacatgtttgtgttttgagaattaatatattatatttttcctttacccaataggtagcatatgttcatatatgactatttcctcttatccgaaatgcattgcaagtagtttcagaacgtctatacactattttaccttttatttcaagtttatacttgtcacgtaaatgctactactttcataagtaactcccatatttctatagtaaaatataaatgaaagacaataaaataatctaatataccattttaaacttccattagtaatgttaaaaaccaattacttcgtctgaaaccagagtgcaaatcagaggaaatgttccaccggcgtgcgtcctcaccagcgaaagggccaccgccgccgggcaccggcggcgcccactgcggtgggaagaagggcggcggaggcggcggcggcgagagcgcgagcgaaagcgacgacggcagcagcagtagtaggagcgccatggccgccgccgccgctcgtagcccgaagcgaagccgacgagctgctcccatggccgcagatcgagctcgctctactatacttgatcaatcgttctctgaaatctgaagctggtagcactcggctgtggttttcacgtccaaggctttgcccccatatatatataacatataaacgcaacgacgcggtttgctatgacaatgcagcttctctacttgctagccagctaggagtgagcagtccatcactcaatagagcagtatacagttcgaactgtagtgtcaaatcctgctcaatcagccacaggttctgattataatgtatactagtaatattatgcttgttttgagaggacaaacaagtggactgcttctgcgtctgaccactgaaagattaggcctgaagactgaagtttccctaagagcaggtacaataggctatttaagccggcggtaatagtgccatgttggatttacggatgagctgaagaggacagagggtgtgagccggcaactatttaatcgccgactgcagctccaagacgagcaaagcggcacaggtctcctcctcctggcccacgtagtggttatggggtccacacgaacggcaggacggagcgatggctagcttttcaatcgctaactgaaaagaaaagagttgttggaaactgtgtaagcttattgcatacactactccctccattccaaattgatctacatatttcataggtacaccaagaccaagaaaagctaataactctctcatactatatttactctagcaacaaactcgatgcatgcaccatcccactatttcctagccaatagcaaatcaagatattgcatgtgggttataaatacttatgtgcatacatgcatcaatgtccatttactccaatacacaaataacgaatagacttaataaatgaacacaaatatgtagatcatttaggaataatctcaaaaaaattatatgtagatcaatttggaatggagggagtaatttttagcactatctctattatactgatgtgttatttttagagccatcagtcagctgtactattaaatttgctctaagatataccaaacaaagaatctgcttaaactcatcctcctcacagcttgggatttgtaaaagaaaatgagccaaagagccttccaacataaaaagctctccacaataacggcggtgacaaaaatcaaggaggaagtcaaggcctgagctttagcaagagcaaaacgtctctcagaattaggggtagtattaatgggtcctttcacaacccacttcagcctttaaatatttttagctaaaaaatgtactccctccgtcccaaaatatagcaatttttagatggatggaatatgttatagtactacgatatgtcccatctacctaaaagttattatattttgggacggagggagtcctaaatttcagtctaactctttttgaacccagccattacatttttccacccctgctcatagctcatccttggttttacttttagtgcggttctcgtttttacttatacaaaatttttactcctactttattcaatgaaattgggacatttagtactggttgtctggttcgttaaaaaaacaagaagttccccaaccaagagatgaacaattctttatggttactgatcaggccacgaggatgatgtattgtcactctccctggcaactctgatgaagacatcctccagcgttcgttgtgtcagccaagccccaggcaagaacgttcatcctgcgctttgcatgctccatgggcttcgccatctcgaacttctgcgtcccggagatgtggtacacaatgttcatggtaggggagatggactggaccagtctcctcatctcctcctccgcctcgcccgtcgcggttgttactgtgaggacatatgagcctccatattttgctttcagctgaaaaggcaagattatgggggttcaagttactaagttagcatttggaatcaatggccacatatgaaaaatgtgatcagtttacatgtgtagatgtacctctttagagttcccgatgcattgcaagctaccgtttgcgataattcctatccgatcgcatagaaattcagcttcttccatcgaatgcgctggaataggtgaaagtatgatgtgataatatgatgtggtgcaaaagatttccatggtgattaactggactaaggttatactgttgtatcagagttgaaagcaaagtgcagtacttgtgagaattatggccctgtcctgcttggcagacttgacagcattccataagtctttccttgatgctgggtccaaccctgagcttggttcatccatataaactacctgcagaatgttcaaaatgcatgatttatacatgcaagaatgttcaaaatttccctgaatttgacatatatgaattgtaccttagggtcaccaattagagagattgcaacgctgagacgacgtttcatgccaccactgtatttgcttacaagcttatcggcaatgccaccagcaaacaggcgcacatttttcaaagatttctcaatggcctaaaaaaataagaaataggagatcttagatgattgcttcagaacttgtatttataataatttctcgtgaaatcataatcacataagaacagaataaccactgggaaaatgtttgttgaactagtattataataatctgtgctaaagtgccttggaggataatgtgtcttggatcttatatgcagatgataagttcatctttcacttgtaaatagtgtttgaagtcgaatccatcatgttcatccatggaaaagaaatcaccatatattacttcctccgacattattgactttattgggtcaaacttttaaaactttgactatcaatagctctcaagatatttagtttgaaaacgtaaaaatcatatgggtagaattttacttattattgcttttacaatattataattttgttagatattatcgttatattctaatagaaaaatagtagctaaagttttgcactaagactggataaaatcaataaaattatatatttaaatacagagatagtacgattatttatcaaatggtcacatattacctgagataatggtgcaccctgcaaattcttaagtctaccatagaacaacaaatgctcacgaccattcagtgtttcccatagcaagctgcaacaagaaaaaaaaagaaggggaaaagttaattaaagttcaccaatactaaattgatttaaaggctgtcctaaactaaacaaaactgtaattcagaaacatcagagtgagcttagattactcgtgctgtggacaaacaccgattcctgcataaatcttgttcatctcgaattgtatgtccattccttcaatgtacgccgtgccagacgtaggtttagtaaatccagtcaactgttgtcaggataagaattaacccccttaaatccaataatgtcatgtgaccaaatgaaacatcagttatatttgtaagtgatctatatagggatcatttgtgataaacagaaaatgtggatcatttcttactacctagacatgtttcagatttttagaaatgtatatgcctgttcctggccttgaaagtggcctgtacttgggaagaggaattgtgcaaaaaatggtttacatactagagatttatggttatctaaatatattatttatttcttttattattaagatctaaaattaaatcatacttaccatgttaatgagagtggtttttcctgcgccatttggtccaagaacaccaaaacattgcccacgtggcatagaaagagatagccctctgacagcaattttttttgcattcccatcttttccatggtacactttcttaaggttgtcacagatgaccgagtagctattctttgattcttgtaagatctgttaacccgtttctctctgagaaatcattatataactaaattaatactcatgatgctctgtgcaaatacatacatgcaggactaatttcaacatattatgcttgtctaaactatcttatgtatttgtattccatacagcattaaagtttggtagaaggaaaaaaggaaggtaaaaataagataaagtaagactccaagtatccaagctaacttttgacgtgccatactataaaggataaactgacatataagctgtttctggcctatgattagaaagcttaacataaatggtcagaaagaccaggagtcttaccggctagcaccacaagttggtgggctagtcggtcttggttcgagacttacccctgcctaataccatcaatatgaatatccttcttttcatatccagctttttctttagaaattacaggaatatatagagatgaacaaacggtgcggcgcaggcggtgggcggcggcgcgcttgggccaagagaaaggagagcgaggggagcgaggaggccgcagaaagaggaagatgaaggggaaaaggagagagaagaggggagaggaaggagaaaggatgaagatgatgacatgtggggcccacatgtcggtgggtcccactattttttttagtgtggattacatgttggtcccacgtatttttgtttttgttttttattctaaaatgccacataagtgacatgtcaacgacacgtaggacggagaccgggtcaacactgccacgtaagcaccacgtaagccaaaaccacttccaaaaccacctgggatacatgttgcaccggttttgatagttggaggagtcaatatatccggttttgtggttggaggtcatgaatcatactcgtattgtagttttttttttaaattctcacagctagctttattcattcgagaatatagttacatcattaacaagaagttgcggaatgaaggcagggggatcatctatccaaacaaaagaatttttgcctatcaaagcttgcctagctagctcatgagccacaacattactatctctaatacaatgactaatggagatagaaagaaaatctttctagtactgggagcattcatcataaatcgcaactgctgccgtggcagaaaaacctccctcttgcattgttgtgacgacttccatgcaatccgattggaattccacacgactacaaccgatttgttgtgccaataataatccatctcttaaagctgctgcttcagccatggttgcatccaccacatgaggaatataactatgtgaagcagcaataaacccacccgcagagtctctaatgaccgctcccgtgctaccagctcctttagtttcatcaaagcccgcgtcgacattgatccttcaggaggtttcctccacctcttgttaatctcagtggttttctttgacaccagtttataatttgttgtgattgctacgatggacaacgccgatcgtggtggtgactgaatttcctctccatgaacactctgtctccgttgccaccatatataccagcaccctgtcaagataatgtccgctagaccaatattgttccaatgcatagctctccctcccattctgatggcttcttgaagcacgaagcgcttcaatctcctgctcaatcccaagagagctccaaacctgtctagcacgagagcaggcaaacaaagcatgtctcacgtcctcagcttctgttttgcacataatatgcttgtttgccaacgtaacgaagcaaggaatgcaaccatgaagcacgcgccatccaaaaattttgattttgctcggtatcgatagcctccaaagctgtctccatactgatgctgccagggggggcagttgccccgggttgctggataaagctcctaaagctgtgactccattgacagtgataggcagatttgactgagaacaaaccgtttcggttgaggtgccaagcgatcagatcctcccgctgaggagcaatcgggatttggaggattcggttcgcatccacagaccagaaaagtgatcttatcaaagcttcatcccatcgaccatcaactggattaataactagaatattacctctcggagtcaatactttcatgttggggctgcttgggatccagttatcgtcccaaatatttatctgtgtgccatctcccactcgccatataaatccctttttgaagcaatctaagccggctaacacactttgccatgtaaatgagctcccacttctcatcttggcctggagcaatttcccatcagggtagtattttgctctcaaaatccttgcgcagagagaatttagctcacataagagtctccaaacttgttttgcgagcaaagccaaattgaaactgtggaagtccctaaaacccatgccacctttacccttcggtacacagagtttccaccaagcttgccaatgaatccttcttttttcatcgtcgtcaccccaccaataatgtgatatagcatctgtcatccctttgcagatttttttggggattttaaacaccatcatcgcataagttggcacggcttgggcaatggatttgattaaaacctccttaccacccatgcttaacaatttctccttccatccactaactctctgaacaattctatcaataagatgtcgaaaacaatcgcttctatctgctcccactaaagaaggcagacccaagtatttatcattgagagactcagtcataatattcaaagattcacatacctccaacttcatatccggctttgtattcctagagaagaaaatactagatttgcttgcacttaagaattgacctgagttctgcaatatctgtctaataagttcctcaggcagtccgcattctttttatcagcatgcataagaattaaggagtcatcagcaaatgaaagatgggaaaccattggggcatctctgcatactctaatcccttccaatgctccattctcctccacttgttggatcatacttgataggccttctgcaacaaagagaaataggtaaggggataggggatccccttgcctgattcctcttgtaggtgtaaaagtttctgtttccattgaattaaaccgagcagtatatcttacagaagtcacacaggacataataagagacacccacctatcatcaaaacccaattttaacataatcttttccaagaaaacccattcaactctgtcatacgccttatgcacatccaatttaatcgcacataacccccttttcccttgtttcctcttgatagtatgaatacattcatacgcaatcagaatattatctgtaattaatctacctggaacaaaagcactgatcacttataacctcaggaaggatgctcttcatcctgcgagagagcatttttgaaataactttatacaccacattgcaaagactgatagggcggaattgagccaccatatctgggttagacacctttggtatcataataatagtggtatcattccagccctcaggaattgttgcagtatttaccgctgttaaaacttcctttatcagatcatctcctagcattgaccaaaaccgtttaaagaaaatggcgtgcaaaccgtctggcccgggagctttcagatctccaatatcaaaaagtgcctttttgacctcttcagctgtaaatggagctaaaaggctccgattcatttcaggcgtgaccttgaccttaactgaatccaaaactgattcatcaagctcctgcatttcagactgaaacagatgggaaaaataattttgcaccatagaacacatagtgtcgctattctcttgtctcaccccctgttcatcaaccaacccagtaatcatgtttcttttccttcgactagaggcaaattgttgaaaaaatttggtatttcggtcaacatgctttagccaatttgcacgggcgcgctgtaaccaaatcagttcctcctgctccattaggagttccaggcggatcaacaactccttttgggcagcgatgctatcatcagtgaggggccccttctaatctcttcaagttttttttgcagcttttttatttgattaacaggtcccttcaacacctttttatcccagacgtggagctcttcatgtacttgcttggttttttgcgagaaatttggcacatctcctctggccgcagcactaccgtctcttccttgagccaacgtgcttcgaagcatttaggacctcgccttgtattggcatcagaatctgcccgcacaacagtttcaacaatcagcggactatggtccgaattgagcataccaccattctccagtcgtgcagtagggaaaagagcattccactgcgcgtttgagacacctcgatcaagcctttctcttattctccccctttgccaagtaaaaatgtcaccactatagcccatatccgagagagcacaatcagccaaagaatcactaaaagcttgcaaaagacgttgttctctcggtctccctccctccttctcatgatggaaaagaatctcattgaaatctcctaactccatccatggcctatccatcatcccatgaagatatctcaaggcctcccatgttttgcctttgtgctcccaacgcgactcaccataaattccagtaagtctccattcccttccatcatcaacaattacatcaatgaaatattcagagacatcttgcacataacataagcagtccaccacttggcccgtcactctcgaaaatgctgagatggtcaaaatttctgccttagctgttcccaaatgtgtttcagacaggaacaacacatcgggtctctcacgcctctgtaaatccagaagcgctcgcactgcccgccgcagttccatgctagtattttcattgtgcccggtcactctcctcaaaggagagcgccgattgtgcattagagttgtttgttgcaatcacgccatcttcacttctcctcaaagggctcatattactaccgagttgggaagagtgttccagcaagttgatttgctgagcaacctgacctcattagtatctcttttcccggactcaggggccaggccaccatcttcccctaaggccaatagcagtgcgggtaacacacatgccgtaaagaaccacacttcacagtgcacaatacatgtttgtgggtcccacccatgttagtaggtcccaccatctctcttttcacattcatctctccctctctatctctatccattcttctcgcatgccactgaccaggacggcaagcggcaagggcgaggacggcgggcaagaaggcacagacgccggcgagctcggacgcggcctcaacctccggtgagcttctccgacgaggacagtggcggcggcgcggaccgaagcggcgtggcaacgagctccccggcgacaccgaggtcggcgacgcggagcggagagcgtggacgacgacgaggccctccctcactcggctccacggcggcgcacgacggcgaaccgcccgccccctcctctccttgtcgggccggacggcagtgacctcgacggtgggacggctgcgcgcatggcgaggtagcgggtcctgtggcggcggcgtcctcggggccgagtggcgccggctgtcccctcctccctccgccggcgccgactcccctaatcccgaagcggaagaagccggcgagggtggcagtggcgccgaacgatgccggggacgcggcggacgggaagccccggggcgaggacggcgggcaagaaggcatggacgccggcgtggcggcgcctctcatcgttggggccggaggccacagacgccggcgcctccctccccctaccccgctccgcagcaacgggctctcggtggggtcttcctcgcggaggtcgccgcgcgacctcgtcttcctcgcggacgacgagcggcggcacggtcgtcgtcgaccggagccacgcgaccttgtcttcctctcaaagccgggtggagcggcggcccgagcggcgacggcgacgacgctgggctgagcggccagatccggcctaggcccactggatcaaggcgacgacggcgaggtcggacgcggcatcgacctcgagctcctctccttctccgcgctttccccatcgagccggcgagcttctccgacgaggacggtggcggcggcacggatcgaagcggcgcagcgacgagctccccggcgacatcgaggtcagtgacgcggagcgggagacggcaacgaggtcgacgctggagagggcgcgaggggacgacgagttggaggcacgccctccacagcgcgagctctaggcgttccctctgcctcgcgcgagcgaggaatcgcgtttccttgcttgggagcgagcggctcaacaaggacgtggtgctacgcgacacgtcggcgaaattcctagctagcacaacaaggcaacgctctacctaggagcactgtgaagggcctaagggatggttaagggggttaaatatactttttcctaaaaaggataggagcgagacagacggcgctgggggacgaggcttgttgggccggccttagcccagactcacgacgcggttgtgcgctttctaggtggacggatggatctgctcgactgctctctgccgtcgtgagggctgaagtcagacgtcacgagctgattccgcctcccctcgcccctgccatctcaagcgccgccgttgtttgctccatccctcccacgccaaccgcagcgcagccgctgctgccgtcgattccgacgcccagccttcgccaccggcacccctccccgctgatcgcctccagaccgacgccgcccctccccaccgaccgcatcgcccccacctcaccctggatcacgacgggatctcctccccttcctctcacccggtgccagaccgccgtggcttctcgctgctctgcctcttccttgtgcctcatcaccctggtgttgaaaggaagaaggtgttagaagtagtgatagttcagagatatgcatgcatgcatatgcagggagtccggtgcatgtgatatgaatgagattgatttggttgagataaaaccggatcacaacagattttgtttcctgattgtaagccacgttggaggctatttccaactgagatcaatatattcgtgcggcctcgacaagaggtgataacgcttcctaaaaaccttttatggtatcagagcccgaaatcgccagaatcagatcgcatctgttatggcgagttcctccatcagcgccggcaatcccttctctggccatgccgtccctaagaagctaaccaggacgaatttccttttatggaaagggcaaatcctcccggtgatccgcggtgcgcgtttggaaggttacctcacaggtgcaacacaagccccgtcggctgtgattgacgccaaggaaggagaagccactgtcaagaaatccaatccggcatttgaaacctggattgcggcagatcagcaggtgttggggtttcttctctcaaccctatccaaggaaattttgactcaagtcatccacatggaaactgcggctcaagtttggaaggcaatcaacgagatgctgtcctcccagtcgcgtgcgcggtctctgaacacgcgcctggcgctagcgacgacccagaaggtcgatctcagcgtctcggactacatcaacaaaatgaagatcctcgccgacgagatgacgtccgccggcaagccaatggatgatgaggaattgatgtcctacatccttgccggtcttgatgatgattgggaaccagtggtgtcttccctcgtcgggagaccagatgcagtttccttctccgagttctactctcaacttctgagcttcgaatcaaggcagaaacttcgccatgcagcagcgcatcagtcctccgccaacagcgccaaatgtggtggtggaaggggcggctacacccccttcaaccgcggcggacacagcggcaacaatggtgggcgcggcaacagcaacaatggcgggcgtggtggtggtcgcggcaacaacaatggaggccgtggcggcaaaccgcgccctgtttgtcagctctgtggaaaaacggggcacgtcgtcgctgactgtttgtataggtatgatgagaactttgtttctgataataagatggcagctgcagcctcctatggtgtggacacaaattggtatgttgacaccggagctacggatcacataactagagagttggacaaattgacgacccgggagaagtacaatgggaaggatcaaatctacatggcaagtggtgcaggtatggacattaaacatattggccattccgttattcatacccctactcgcaatttatatcttaagaatattttacatgttcctaaggccaagaaaaatctcctttctgcacgtcgtttagcccttgataatcatgcctttgttgaagttcactctcgtttctttgccattaaggatcaggtcacgaggaatcttcttcttagagggccttgccgcaatggtctctatcccattccacagtcgtcgctatcttcatccaagcaagtttttggagccatcaaacccactatttcgaagtggcatagtcgtttgggtcatccatctttgtctatcgttcaaaaagttgtgaacaataataatctcccatgtttaggagatattaatgaattaggtgtgtgtgatgcttgtcaaaggggtaagagtcatcaactcccctatcctaagtctttcagtgtgtccaataatcctttagagcttgtgttttctgatgtttggggtcctgcccctgactctgttggtggcagaaaatattatgtcagtttcatagatgatttcagcaagtttacttggatctatttgcttaagaaaaaatctgaggttattcataagtttcatgagttccaacaacttgttgagaggatgtttaatcgcaaaattattgctatgcaatctgactgggggggagaatatgaaaaacttcattccttttttactaagataggaattactcatcatgtctcatgtccccatgctcaccaacaaaatggctccgcagaacgtaaacatagacacattgtggaagttgggctttctttacttgctcacgcttctatgcctcttaaattttgggatgaggcttttcttgcagctacatatctcatcaatcgcacacctagcaaagttatacaatactccacgcctttagagcgtctcttgcatcaaaaaccaaattactcctctttgagaacttttggatgtgcttgttggcctaatcttagaccctacaacactcgcaaacttcagtttcgctccaagcaatgtgtgtttcttggctatagcaatattcataaaggattcaagtgtctagatgttgcaactggcagagtttatatttctagagatgttgttttttatgaaaatatttttcctttctctaatctccactccaatgctggagttaggctcaaatctgaaattttactcttgccctcaacactgttgaatcctgaagttgctagtaggggtatacaagaaaatggttatatgtttaatagtcctcctgttgagtctaatatttttgatgagcaagtatctgaacagggagaagaaggagagcaaaattcatatgctgcacatgatacagaaaatcctgatgatggtggcaatgatttctctgttgcttctgatgctgaaaatagtactaaggctgtgtttagttcagcgcaaagtttggattttggttgaaattggagatgatgtgactgaaaagttatgtgtgtatgacaggttgatgtgatggaaaaagactagagtttggatccaaactttgaatctaaacacaggctaatgcaagtggttcagctgaaaatagtactaatgcaggtggttcagaacctgcagcaaatacacacggcgcagaaaatgaaaacagtgctactgctgctggaagtaccacagccgaacctgcaaatggcagtggtggtggcaagtctgcgagtcgcagtagcagcagtacagcaataggtagcagtgttactgctaatcagtcggttgatgactctgtgcaggtacaacagcagcaaactagacctaccactaggctgcagagggggatacgtaaggagaaagtctataccgatggtacagtgaggtacagttttcttgcttcctctagtgaagagccacagagtttaaatgaagctttagctgattctaattggaaacaagccatggatactgaatttacagccttgattcataataaaacttggcatttagttccaccacaacatggtaggaatgttactgattgtaagtgggtatataaaattaaaagaaaagctgatggtagcctggatagatataaagctcggctggttgcaaagggttttaaacagcggtatggtattgactatgaggatacttttagtccggtggttaaggctgctactattagagctattttgtctattgctatatctaggggttggtgccttcgacaacttgatgtgcagaatgcttttcaacatggtttgcttgaagaagaggtttacatgagataaccgcctggatatgagaataagagtaagtctagttatgtttgcaagttagacaaggctttatatggactgaaacatgcactacgggcatggtattctagactaagtagtaaatgatgtgatcttggttttaagtcatcaaaggctgacacttcattatttttctatagtaaagggagtgtgactatttttgtccttatatatgtggatgacataattgtggctagttcaactcaagatgcagctgaagcgttgctaagagatttaaaacaagattttgcccttaaagatctaggtgatctgcactattttatgggtatagaggttaacaaggtaagcgatggtattttgttaacccaagaaaagtatgcatctgatctgttaaaaagggtaggtatgtcaggatgtaaacctgttgccacacctatgtctacctcagagaagttgtcagctcataatggtactgaactaggagaacatgatgccactagatataagagtattgttggggctttgcagaacttgactttgactagaccagatatttcttttgcagtaaataaggtctgtcagtttttacatgctcctactttacaacattggatggcagttaagaggatactgagatatgttaagtcctctgttgatcttggcctaaagattaacagatcttcttctactcttgttagtgctttttctgatgcagattgggcaggatctgtagatgacagaagatctacaggaggtttttgcagtatttcttggatcaaatctagtgtcatggagtgctaggaaacaggctacagtatccaggtcaagtactgaggctgagtataaagcagtagcaaatgctacagcagaggtaatgtgggttcaaactcttaaagaaattggagttcaagttcctcctatggcaaggttatggtgtgataatttgagagctacatatttgtcagtcaattctgtgtttcatgctagaacaaaacatatagaagttgattatcattttgtaagagagagagttgctaggaagcaactagagataaagtttatagcttcaggagatcaagttgcagatggttttactaaaccaattactgtttaacagcttagagattttagacacaatcttaacttagataagttatgattgaggggggctgttagaagtagcgatagtttagagatatgcatgcatgcatatgcagggagtccggtgcatgtgatatgaatgagattgatttggttgagataaaaccggatcacaacagattttgtttcctgattgtaagccacgttggaggctatttccaactgagatcaatatattcgtgcggcctcgacaagaggtgataatgcttcctaaaaaccttttagaaggaagtagcaagcaccagcggcagcgaagtcgacggttgggagaccctaaaccctagaaccaagctccagaatcgatccccttttgcctaccggtaatgggcgacccagttctagcctacaggtacggactccttcctccctctctcccagacaatcacgacatcgatttatttatcccattgctcctgttaacttggtgcgttgtttgattcccagcacttgtttcagaatgacgtgtgaaattgcaagtacagagcccagtcagtcatctcctcatcagcacggcggtacgagaagtctgggcacagcaagcaagcaggaggctagcaaaggtttgtcagctctaatccaaaaacagcacctcattgcacatattttccctgtatgtgaaagaccatataagctgtgcagacaacaggtgagtttgatctccctgtgtgtgaaaaccatctatcgtgcagacaacatgtgttattatcctgtcgtttatatgcaaactatattgatagttcgagtgactgaataatcaaaatgagtcattgtcagtgagtagtattttcatcaggtgaagaaaaatggtagataatattactatatgtcaatgtcacgcagggtttcattcagtccctacacacagattccctatgaaaaaattcattagccaggttgtggtagtgtggtcttatctgccaccagtaatgcaaaatactaatctgagtgtaaccaaatccttgaaattttcaaatattcaaatagaattgggagaactgatgaaatttcattttagaatcctgcagtgtgtgaaggtgtgaaaatgagctttctggtatctccttttccaattatgaaattatttttctttatttatgatacatctcataggtagattgaagaaattactatgacagagtgagttctagatcccaccaaaaactcagattcaattttacctccagcatagtgacatattcaatttctatctcgaatggtgcttcaatatcaatgtggggttttttttggcccttttttttaaatcttccttcctctattctttgtgtaaaaatataagatgcagtttgaaatgtattgttttttatatggtcatcggcatattcttgtttgctaaaggaagtatgtttgataaatagtatgtttcatatcagagctttttcctccaatatcttgtcatgtatggcatttccaatagcttttcatggtgtcatctcgatggcttgcatgtataagagatagacgggaagggcttgtaactataggggtaccatgattgtgtcagattgctttgacctttacggaacattatttttcaacaaaaaggaataatactgtgtttcgatatcctcttttcttgtatttcagattctgtattatgtaactcgtcgcatttggtgcctacgtttgtactatatcttactgatttacagtaggacctaagtggtgttcaatttttcatttcattcctacccctaaagataggtactgtggcatggaagatgtatgtttctgtgcaagctaaatcgcacttatgcataaacgcatggttaattactttatctcctcagttaatctacacaacttgatttccaaaaacttgatagtatcaagtgaagtctcaagggattaatacatgattatgctttgaagggctttagaaaaaaaatgctgggcttaagtacaacatgctggatcactaattatccctcttctcaaattgatcaaatagtactgcccatctcgaactatgtatattctaatatccataactgcctactctttatgatcatatagtattgtctctaataaatttgatactgtgattttatatcatgatttcttgtatagcatttttcattgaatgctttgttgttaatgctatccctcaactatcagtaggaccagttggatctgtcgagtctcataaagaagagatgcttgtgcttgtgcttgctggttcatcaaacagctcgggaaaggccttggcctctccagtcggagctccgacaaaggccgcagcgcatgcatctaggcaacattaggacctgctttgtgctaggagctactgctctactaccatcgtcaccgctcaaaacatcgtaggtaggtagcctgatttcgtctatttctcttcaatttctgcaccctgtctgaatgtctggctttttagggttcttccgctcctgtacgcccacaatctttcaagtaattgccaccagcagacctccctgcaggacatcagcgagctgcaggttgcaacacgccagcaggtatttcttaatttggatattttaattgttataatgtgaaggaatcagtggatagatctagcttgaatatttgactatctgtcattaatttacacagaaatgagaaacacatatgtagccattaatgtatatgatgtttataggtcaagctatatgtgattagttttcttaaggaagataatagctcaaagtattttcttcctcagaggagattttacaaaaagtactgtcaccggcattgcggatccccgatctccaccgccagagctgcgtcgctagactcggtgacgcccatctccgtgccggctccgatctccacttgatctccaccgccaaataccgtcgcccgcctcggttgtctcgtcccgtcctccgtgccacccctgatctccaccacccgaacaccgtcgcccgccctgtcacccgcctccacacagccacggatctctgattcgcacaaaggtacataaatcctcctctcgtttcatcatacggttcttaatattttccagaatcaaccaaaatacaacgaccaaaacaatcattatggtatattatttgtgtccaagttctgatgaatataatgatgtttactatattaattgcaccactaaaatatgggatgtcatcagtattttattttttaagctttctgcctgaattggtttcatctgtcagcgtaaggaattgcttgagtataagactcagctgtcaagagggccgtctcgccgtcgtctcaggctagggggccgccgccaattatctattcccatagagggctgctatataccggtatcccgacgaaaaagggataattctgaaaccaacacaatatcgtgcgcgtgcgtcaacaaaaacaggaatagaaacgtatcgtaccagtgctcgctgccccgcctgaatcctcccgacgaatcctcctccagaatcgcgctcccgcgtgcgattcctcgccggcgcgagctcctccgcaacccgacgaatcgcgattcctcaccggcgcgagctcctccgcatcccgacgaatcagcctcggaatcgcgcgtcctcgccggcgcgagctcctccgcaacccaacgaatcctcctcggaatcgcgcgcgattccgagtcggcgcgaactcctccacaacccgacgaatcctcctcggaatcgcgcgcctccgtgcgtgattcctcaccggcgcaagctcctccgcatcccgaagattcattcgcggaatcgcgtgcctccatgctcgtttcctcgactgattccattggcgcacacgttgtctgccaatttcctctgcaatccggcgtcttatgtgattgctgaaatttttcacacaagtagcacatgattcttgtggttttcaaagatgatactctattaggatcatgtgatactcttgaggatcacatggtactcttgttatcttgtaggatcatgtgatacctctgtagcatcacatggttctcctcaaaaaagtatcattaagtgtgatacatttgaggtatcacatatgatcttacttaggtatcatgtcttctaacatgatccctatgggtttcacagatggtacttaatggtgtgatactttacaggtatcacacatgatcctactaaaaaaaatatcattaagtgtgatacatgtgaggtaccacacatgatcctacttagggatcttgtcttttaacataatcctacttgggtatcatgtatcctacttaggtatcatgtcttctaacatgatcccaataggtttcacaaatgctacttaatggcgtgatacttatcacacatgatcctactaaaaaaagtatcattaagtgtgatacatgtgaggtatcacacatgatcctacttaggtatcatgtcttctaacatgaacctacttaggtatcatgtcctctaacatgatcctacttaggtatcatgtcctctaacatgatccctatgggtttcacagatgatacttagtaggatggtgtgatactttacaggtatcacacatgattctacttgggtatcatctctggtaacatgatccctgtgaggtttcagatatgatactttagtaggatggtgtgatacctgtgaagtatcatacatgatcctacccaggaaaatcatctatcatgatacatgggtaggtaggatcatgtgatacatgagtttcattatgattgatacatgtgaagtatcacatgatcctatctagtatcatgtcttgtaaagtggttccctactggtttcacatatgatacttgagtaggatcatgtgaaccctgggaggtatcatgatcctcctcagtatcatttcctcaggtttcatatgatactgaactcggtttcattgtgtacaacgtactcaaactatatatagtccacagaaaaggtctacgcaatataatccacttctttaccaacatatatgtacatgaaaacagtagccacatacagagttcatgtctttgattgttgtgccccttgcaaccttccagttcaagacaaaaacagtagccacatacacaattctgaaacttgacttgttacatatgttggttgggggagagggagggagggagctacaaaaatggcctaagcacacatccgacactgcttgaaccgaatgagcatattggttctgaagcttagaaacgacgttttggatgtaagtcgttaaagcgatggtacaacaaccttttgcatagctcactacgatattctttcatgtagtcctgcatagatgacaagaatgagcagtgttagatttgtcaaagtggggtgaagctgagccgttgttcaaccttggagagcaccttgtcttctttgaaacatgcatgaaatcggattcgcttgaagcaggtggcaacgccatttcaactctgtgcacatgtgtgaacggataaagaaaatatcatttcaatggtgattcatcctcgattgaacaaaagtatctaatcattttaaaacagaaaacacccatgtagccactaagatatgcaaaacatcaacagaaaaaaaaatccaaatcatctgcatctatgactcagctgcatctgccatctctgtcgccacgcactgccctctatgacaaagaggataacaattgacaagcaaagcgtgcccggaactagaagccaacaaccgactgatgcggatttctctgattttgtttacacttcagttcacccaaaaaaaaatcctactagttgaatggagatttctctgtttcaaaacagtgtgtacttgttaacggcaaaattgcttgctccaagcaatatttgccttcccatcaatatacagctagaagcatttcaagcgatctattccaattcgaacattttgctgcaagtatcatatgattcagcacatacacacatccctcacctctgctacaaacacccccagtgaatgaacaaaaacacacagaaaaaagagagagagtattaacttactttgatttcaatttggatgtgatatgatgagccccatccacaaattagtgattcaacaaaccctagaaaatgcaaaaatgaagagatgttaaatcaaaatcaggaaatcgatgaaaaaagaggaatgagagaaaggggtatcgtgcgcaccggctctgccgcagcagcagccaccggctccgccgcagacgccaccggcttcgccgtagacgccgccgccacagccgccaccaccacgctcacgccactctccctctctggcactactgaccttgtgcgcatcggcgccgctgaagaggaggagccgcaagcaggctccgccgccggctccgcccgccgccgactccgccaccgccgccggctccgccgccgcagccatgctcgtgacgatttgggagctgtaggtgtctgtttgggagtgactcagggccgttttggattgctaccaaaacttagccttaccaatattttggtagtttaaatagtacatgtgcttgtttggattgagaccaatttattggtaatgcccatgctagatttgccatcaatctagaacaatcttcactagaagtcacatgttggctttatattggtaccaaaccaaatataatcttatcctaccaaaaaattggtaggaccaaaatttatctaagatttggcactactaaaaatttggcatggtagcaatccaaataggccctcaatgtttctcgagtgtgtgtatctgatccgtgagggtgtgtgtttgatccgtgggaaattgtcccgtccggggctgactccaaacggtataccggtgactagcatttctgattcccatatcactatgaacaggtgttttgcgctcgcaaaacctccttccctgaattgaaggtacaagcaatttcaagtttttataattttcataatgggaaacctgtttagattgtcgagttttcagattatttagaatggggtgcctgtttagattgcagcataggtaaaaaataaaaataatatactcaatgcagttctaacccctcgatgcattatttcagttgaagttcagcatctaaaaacgtatatcgcctctccaaacatgatgtgtactaaaactaatgagaaatgcttcctcttgattgagcagatattcattgtgaaacagcactataaaccatgtttcttctatcatcattaaaaggctgaatgaaaaatgccagagcgagcgttcctctgaatatttctgaatttggcgatatcatttctgggttgttcttagtgaattttgaatataatcatttttattttaatcatgattgatttgcacactaatgtcgtcatctggcaggagcacaagctacccattcaaaaatcggtgttgggcaaccagccgcttctcttcttgggaccccttgctgtttcccgtcgacgtcgggctttttctgacttgtgggttctactattttattcccctgttttccttgtgtgatcgatacgattggttaattaatgatgcagaactagccttttgtttttccgtggtaccaaaattgacctttggtagctatgaacgacatatgtcttggcatatttcttgcggtaaaaaggttaaattttattgtacataggatccgtgccctttacagttcctaaatcctactgggcagatatgttcactcgagctttgctcaatgcgatcattcacactatatgtttctctgcttattttctgaataagctggtaagtagtattatgccacctatgagaaaaaaaaagttattatctgcatgtgtgagaaaataacttattaattatctgcatatgcttccctaattcaaatagcaggcttaatcttttgtcaagccaggaaaaatgctaactgtctcagcattactgcagagtgtgtttgggctgcaactaatttttgaagtgcagtgagtctcagaccttggagataaattactgaagaactggactctaatgtgagtacctgtttaatatctgttctattaaccttcaaggatttctttgtaacaagttttaaattcagtcaacattgcttaagacttaagataattcagtatattttgttataaattatgtgccgctatggctcttttcaatgcgcattcgctgtttggaatgcgagtatgttcaaacttaagaggagcatttggatcttgctgttttaaaaccatattggtgaatatgcagatttctgaattgctctttcaacaaaaataaactataatatacacacattacttcagcaaacatgactttagcagcttagcttttctgaaacttgatgggtgtgtgtttagtatgtttgttgaagtctgatttcagagataaacttagaggtacaattgctcagctgccaagatctgttttgtagaggtacaagtacaatggcagaatttatctcaccatgattcctttttatatggtgaaagaataaaggaacaaaacaaaacaatgataacttgctcagtagcactttgagacaatcttatcctcactttagaactccatgaagtgtgtgatatgagtttctgaccatattttctgaatttggcttatgttgtattttaattttgtagtcttgggaaaccattttaagcctctgaattgttgtagggttgatcactttttctaggccttttgtttttcacctggcgatctggcatcagatcagactaattatttgtctagcccttaattgttgtatatttgaacaatttgcacaattatttgagaaaaaaaggaattacctcaggattgattagtcgcacagaaacccatcctttattttcacatggcctggaaacataaggtgcagatattatcaccttccatgaaaataaagtgtactatttagtactgtatagtgcacaacatatgctatttcacaaactgtttttagattatcataagttgtcatgattccttataagtttctaattatgaaaatgaaagtgttgtaagcatgtctgcttgttttccattgccagacagactccattttggattttattaaccaatgtggtatgtattgtcctggttatttctcaaattgctcctctaccagattggctgaatctggaaaaaaaattatgagattgtttactacatactaagatttaccggtaaattatccaattactctcttgcgtccttgattcctcaactattaattaatcttttgcaccttgtattttccaatattgttattccttcgacaaaataagtttttactcttactacgattcactggtcaaataagggcatctcataattaatgtggtgtcaatgtatatattatacaatacatgtgcgacatatttaattgcaattaggaattttacatgtcaagttgttgaaggaatcaaacagtagatgatatcttgccaaatcggactttgctctaccaattgatataaatataaagtaagcctctattgaaacctatggtgctgaagttaatctttgccaatcagtactatctatctatctattatataatatataattaaatgaatagaaaaaaggagcctccacgttcgctctcatggcctagaaattctcacattaatcggagaaaaagaagaaaaagaaaaagcagagtccatatagaaatacaatttaaaaatagaagaggagactagagtccatatagaaatacaattaggaaataactgaaattcggaattaaaatataaggaatattagaagaggagactagagtccatatagaaatacaattagaaaataactgaaattcggaattaaaatataaggaatattagaagaggagactagagtctatatagaaatacaattaggaaataactgaaattcggaattaaaaataaggaatattagaagtagagtatatagttcatatagaaatacaattaggaaatgaaagaaatttggagttaaaaataaggaatattagaaatagagtatagagtccatatagaaatacaattaagaaaaaaaatacaaattcggaattaaaaaataaggattattagaagtagagtatagagtccatataggaatttaaaactaactaaaatttggaataaacgagtccatatagaaatacaattaggaaataactgaaattcggaaataaaatataaggaatattagaagaggagactagagtccatatagaaatacaattaggaaataactgaaattcggaattaaaatataaggaatattagaagaggagactagagtctatatagaaatacaattaggaaataactgaaattcagaattaaaaataaggaatattagaagtagaatatatagttcatatagaaatacaattaggaaatgaaagaaatttggagttaaaaataaggaatattagaaatagagtatagagtccatatagaaatacaattaagaaaaaaaatagaataactaaaatttgatattaaaagaaatattaaaagacgagtctagagtccatataagaatatatataatttacaaataactaaaatttgatattaaaaataattaataactaacacgtatataaaatataatataaaaattcagaaataaaaataaataatataaaaatatataataatgctagccgcgcaatctgcgcgggccaccatgctagttttctgtatatgtactatggtttctaacaacaggtagcggctttggtgaggtgtgatctgattgctcacatacatgtttatgctttatacttccaagttgcaaaaaaaataaataaatgataccaacgtcctcttgttttatacagcacatcatcacaatttaattggaataatgtgtaattatcttctccatactattgcgttctagatgtgtcagtttgcaccgggctgataatatgactatatgttaacacttgtatttctttaaatttgtactttagcatcggcaaattttcgttgtcgttccatgtagatcttaaaagaagacgttaacgagatgaccaacaattgttatcttgttttacatggtaaaactattaatttgatatatgtatcatatcaaactgttatttgagtttatattcacgatcttatgctaacacaaaaaatattttttttgttaacatgaaattttattgagcttatattcaagtcttatgctaacacaaaaaatatttttttgttaacatgaaattttattgaggttatattcatgtcttatgctaacacaaaaaaaaaattttgccaacatgaaattttaaactttattaaagacaaatagaaatacagtgtagcgtttagcactgacatattactagtaatgactggttattcattgccaatttaaaaccaccattattttcgccgtggggaaatgcagatgggccagtccaattaggcctaatgtatgcatatatgatggttcccatcatcacaaaaatagtccgcaaagagattttaatcatatgaaaatataaaacgaccgacatatatacgagcagtgttgtggaaaacggtgttaacggccgttaatacgtccgataatacggatacggagatcagtccatcacgtcacgccgatccggtcattattagtcggtaacgaacccataaatccgatcattaccgattaaatcgtccgtctccgtctaatcagacgtataatcggcgtgatgacaaaggtcgattccacaatccagctcattagctgtgccctttggattcggatcaagtgcagtcacagtagtgactgcaactttggcagtacctaatcatccaaccatccagcacatgagggatggtccagatttaactgtgtcatgcatcattttagctatttgaacaagcacagaacagcttcagttcagattttgcctgcaatttctctccttttgatctgaattttcttgaactttcagaaaacccaaatattgttaaagaaaagtagacacagacttcatttcattatattgaacttcataatatcttgcacgcataattgacaaaatgagctagagtttaactattttcgctgaaattgggtgtcatgcatccactgagacaaaagctttcaaaatcaactagccatgctactgctagattaacccagtaacaaaagctttcatgatccaaaagtagatcatcatctgcttcccaaatcagcacgatgccttctaagttctattgacctcttcaaatgaacttttgagataagatgacatcttcaacgtcaatagaaccctagggaaaaaaaaataatatccaaattaaaataatttgttagcacatatatttatctttgaagaaactggtcagcataccagtagaagttgggcatagctgctaattgcttcacattcttgatgttcttccacatcagtttgcatgttttcctcctctgccttttcttcaggctgcataacagatttgagaagtggctcaatatatagttctcaatatatatagctgcataacagatttgagtagtcgctcaaatatatttacctttctcttttttgttttttgcagtttatcaatccaatttgttttccgttttgttacacgtttccggctctcctttttcttcagaccagagacatgtgccaagttctgagctaactgggatgttgactgatcattcgactttgcaatgccatcactgtaagtttgttttattttgtcctcaacttttttactaacggcatgaagtgcttcttccacaagcaagtaacattcttcaaagtctgcagctctggaagccaaaggaagaaattgctggtacagatatctgtacctaagagtagtactcagcttggggtcttccactatttgtctgccatgcatatcttgaatagctccacattttgcttctcgagtccaacgcttcaatacatatttttcaggcaacaatttaatgttcactaaatcaagagctttcaaggcatgtctacacagtagacctattctctcaaacaatcgacaactacacgacacggtctgatcaaaagggttggcagtcaacttgtgctcatcttcaagtatgaactgatcatcaagtgagccaattgcaattatgaaatcattacttccatttgatcctttcgtataggcagccatggatttcttttttttcgccgggccggcgaatagccggccgatgtatattaagagtaagaaagggaatgtacaaggtagcgcggtgcgtcaatgcaccaccatttcagacataaaatgaaagctaaaatctcacagaatgagttgctacagagtgacacatggggctaacaagacctgcagctatccaagtctcccattcatcccccatggcggaacagccatggatttctcatattcggcttggaagacttcaaataaagcaggtgtgtaaagcttacttgcctgtaccaaaataggtgtcatcatcataattcttggcaaattctttcttgattcatattcagattgcaattccttctctctcttttcttcaacaacacgctctacacgattaaggaacctgccgatgtcaagatctgatttctaatgacctttcaagttactattcaaactttcacttaattgtgtgcttcgcatccctattgtgaaaacatctgacatgtagcactcagcccacttttcttttaaattgtatatgctatccaaccaagtcactttacgcaccttttgtctcatggcatcaaatacttcttcaaattcttctttttcctcatactcatacatacatgcactgaaatctgctaggatacttgaaccttctgtttgttgaggactcaaatgctttactgcattttgtgatatgtgccaagtacataaaccatgccatgcaccagtgaatacttcagacacagcctttcccattgcaatgtcttggtctgtaaaaatggtttgaggttgcttttgattatgggctgataaaaatgtattgaacatccacttgaatgattcaaatgtctcatcatacatcaaagctgcaccaaaaaccactgtctctctaaaatggttgaagccaacaaacataccaaaaggtctactttctttatttgtcccgaatgtagtgtcgaaggtgatgacatcaccaaagtgagcataatcagcaatcatcctagcatctgcccaaaatatattagctatttgttcttcgcaatccaattgcactgcatagtgaaatgagggattttccacaattttatcttggaagtactttagtaaacttcctgcctcaccataaagtaagtccctttggcgcctagaacgcaaataattcttatgatcacgctgtgtgtaaccaagattagctgacccaccaacatgccgaccaagaaactcatgtgctgctttaggtgtaataccagaatcatacgccacctcaatttcgactgcttggtgtttagaaatgttcctttgtgatggcatcaaacggcttgtttgtggagtttgaagaagatggctgtgttctacagctaagtcatgaaccttgtatgtcattgtttccctgagtaaagtgatgcccatgcgaacttggcaaccagttcgagtatgagttcgattacgttttgctacagcatatttcttttcttctgctctagaaccctgatttgaacaaacaaacctactggatgttactaactgatcaagatcacttttgttagtgtaattctttcgaacatcaaagccaatacgaccaccatatttgacccaaaaatcccaagcttcttcataggaattaaatgtcataccaatttgaggcatccaacagggaggtttagtagatctgttacattacagtatagaggaataaaaagtttgatgcatgaacaaaacaggaagaaagaagacaaaaatcagaagacaaaggatcctatcgcgatctgtacctctccaggttttgctccatggccttctcaacggtcatggctgaacagagaagagaaaaagaagcgtgtgatgtgcagcagtagggggtaaagtatgcttcccatggtagaattggcgccaattctcacctccctctcagacttttccctccaaaacacatctgctggagtcagagagtaggtgaaaagttgggggaaattgagcaaccaatctagaccatcccttgtgtgctggatggttggatgatgggtactgctaaagttgcagtcacagtagtgactgcatctgatccgaatccgtgccgtttactactattgactagaagtttgctcttctgaaattctcacaaggcagcaagatgtaaaatgacaaggaactgacttcctctaaaggttttgaacatgagttccttgattttgatgagtttgctcttccggaattctcataaggcagcaagatgtaaaatgacaaggaactgatttcctctaaagtttgaacacgagttccttgattttgatgatgatcacgttattggagtttgtatttgatgaagctcttcgaggtaaccgatacacatgttatttgggactttgattacggtcatttatgctatgtaacattctcttgataattcatttcatgcattatgaacaaaacccatcactacgtgagaattgagatatacagtaacagctatccattatgaatttatttaaatgtcatatatggttattctatttaaggatatatatagaaggaatatatttagttatatgcatttgtttatcaaaaagggaaaactattatcaactactacctccatcctaaaatataataacttttggctatgatagctaaaaatgtttatatttttggacggagggagaatgtacatatatttttaaaacgttatatttccgccaaattccgattaatcatttggcggtaccctttgtctgatacccgtataccgttttccacaacactgtatacgagtattgtacagtttctgtaaacatcaataatatcctcgaatttcaaaccatcaataatacaatttgttactccatctgttttatattataaattgtttgacttttttttctaatcaaagttctttaggtttgctcaaatttaagtaaaaaaaatagcaacatctataacactaaattagtttcattaaatttaacattgagtatattttaataatatgtttgttttgtattgtattgtaaatgttaccatatttttctacaaactcggtcaaacttttttcggtttgactaagaaaaaaatcaaacgacttaaaatataaaagaaatggagtattatcattccttcaatccaacaacaaacggagcatcccattacgcggctctcaaaaaagtgagatgcaacttatcaaagtcgatgcaacctcgcgtcaagtgtcaagttttgtcggtgataaataaaaacctcgggaagaatgatggcaatgcgccgagagtaattgtaattatctatgagataaattatagggaccctgctatgagataaattatagggaccctgggtatacatatttatacacacaaaccgataagagttctatttagacatgacacaaacatttgtaaagataaaagaaaaaaacattcataaatacaaaacttatctgccatgtcgtggtcttcgtaactccttttcaaactcgatctctgttgtataaatcttgtcatatttcgttaacgaaatttacttaaatattcaaaccaaattttagcattaacagttctctatgcatgccacattttgccacggccttgtttagatccaccctaaaatttttcaccctatcacatcgaacgtttgaacacctgcataaagtattaaatgtaggctacaaaaataattaattgcatagattgcgactaatttacaagatgaatcttttaaatctaattgctttatgatttgataatgttgtgctacagtaaacattgctaataatgattaattagacttaataaattgtctcgcagtttatacggcaaaaattcagtctaaagtaattcggcgggcgatgggccccacagtacaacatctcgatttgctccgatgagataactgtcccgtatggccgtatatatctgtaaattgcccaacaaaaaaaaggaagaaaagaaagaaaagcttctccccgagctccgagctcccgtgccgcccgctagagagatctcgcccgccgtccccgagatcccgccccgccgtcgagatcacgcgccaccgaggagaggagattcggcggtccgcctatcgcgtgaggacgagcgagactgcatactccagaaggtgcgtgatttcttccagatcgaagatactctttgtcaaaagaaaaaaaaaatatagaaaagaaaaattttgaatagaagaatatcaatagagacgatgatgcggcggtttgtgaatttggtggtggacaccgccggcgtcggcgccgacgcgacggcgtgcaagctgtaccgcgtcgctgcatcggccctcttttcatctccagcacgtcgtcaagcagcagccaaagaactagatccagatgacgtggacgacgccggcggcctgcctcctccggccatcaccttccacccctcctcattgtccggccctggcaacgtcgatttcttgcacctccccggcgacgacagccttctcgccctcgacgtcgacggccgcggtctgctctatagtgccgcctccgccgccgtccgctacatgcccgacccgtgcaagcccaagatggagcccatctccttcaccgccggcgatagcgtcctctacgtcatcgagagggtgcccttctccggtaaccccggctgcttcgaggctctcacctacggcctactcccccacgacttggacaggatgggctggtactggcggtctcttccgccgcctcctttcgccaaggttggctacgacggcgacttccggcgccaccgccagcgccgagagtacgacatcaccgcctccgcggtggtgaacgagacggagctgtgggtgacggcgcacggagctgggaccttttctttcgacacgcaggttggggagtggagggggcgcggcgaatggcggatgccgttcaaggggcggggcgagtatgtggaggagcacggcaaatggtttgggctctcctccacgccgctgcaggggctgcacctctgttcctgcgatctctcccatctctgctgttcctacgatgtgccggtggtcaggcgctggttggatggcctagaccgtctgccggcggcggcgccgcccaagcaatcctttctgatggaagcctacgccgtgcacctcggctccggtaggttctgcatcgccaggttcatggaagaggaggaggaggaggaagttgaggaggagaaggacaacatctcagttcatccattcttccacgtcgccggcgtcaacaacaacaagaagaagaacgacaggttcttgctgctcaccggcgttgatgtggtggcctgtgacgacgccgtcctcgtgcacaagtctatacgctacccattccaaaacggcgatttcgttcgtggttactctcgactcttttaatttcatctaatttacttattatacctctctccggtaaaactagctatattttgttttgtgacggagtgaatatatcatttttatatatatatcccttttcctttcgattgcaataatagtaataatgctgtatatgaatggtactttttgggtactccattcgtttatattaagaggctgtcctcttatagtcttattatacatgctcattcttgactctggaaaaagaaactttttttttgcaagttagaccgaaggattgaccgaccaaattttattaagagagaaaaggggttataattgtttacaagatcgacattaagctgtcaaggcaaagtgacaaccaaaccagtcatcagccgaaaagaaaaagtgaaaacagaacagaggccaactaatcacattgccaaaaaaaaaattcctgcttccttctaatgatcatatgatgaattccacttacagtactacaatttgactgcagctattttgacaattaagaaagcagagtgttgtaaaatttgggcataataagatgatatatcttccttagcagttagcacagcaacaacatcccaaaggtgaaatgtttttgaccggagtgatgcaactgcaacatatattccaaatagattctctctgcaaaattaaattattcaactagttccatctcattgcacgcctgcctgatgtgttgttcattgtatctcaaaaatcatatttgcagcagagcagaaaaaaaaaatcatttgcagcagagcagaaaaaaagcatcagtaatccatgattattattattaattgctcacatcacatccggtggctcatggacgcgagcaaatgagtaataatgcaatatatatagatggacgagatgatcatggcatgtcggcagcgtgatcgtgatcgatggcggcgacggggaggtgagtggaggaggagggcggcggctggtcgtcgtcctcgtggcagcagaggcagagcatgccgcggaggaggttgcacttgccgccaggaagccgagctgcttgcagcaggcgttgcacttgcctctaaaatccgattttatccccttgaatacgacgcgaatttggattcgttttcgagtttatctctccgccaaaccctaggttttcccggcgtgattccttgcgttccaagcccgatctctctctcccgtggctataaatagagtccccttcctctcctctttcgtttgcctcaagtcccagccatcgctgttgcctgtagcgccctacccgcggtcgccttctgtctccgccaccggcagccgttccagccgacgcccttctgcgctgccacttccctcggctccgaaaggctgatctccatcccggccgctggttaccttgcgccgaaactcgccggaagcccttcgtcactttgaatccgatctactccgcctccggccgaacaccaccgttgtttccgtcaacgccaagcttcgccgttgccttcctcggcatcacagcgccaagacgaagcccgtccacacctccgttgctcccatcgtcacctacggtcgccggccgttttccgtcatcgattctcgtcaccgtcaccaccggtgagttcgtctcgtcgtcctctccgcgttggtgctctcggatagcccggctgagcctcctaacaccggcgacctcgcggaccagtgcatggtcggctgtgatgtcatcgatgatgtcattatctatttaataaatcgtgaattctttgctgtataaggctaaaatcagtttaattaatcttgtaaaattcataactaattcatatgaagtcggaattaagtggttcaagtctctaaattcatctaaaatcatgatctacatgtttgtttactttatatgtactgtttatttggtttttattagtttttttttctcgttttgcgtgttagctcgtcgttttcatcgttgcgaaggttcgcgagtgcgtcggaagtgttcaagaagactaattgaagaccgattattgtaaggcaagtcacacaaatcccaaatgaccctttgagcatgttgaacccatttaaagctattgttttattttaaaatatgcattattttcgaatgtcattgggtggtgagtctttctcatttaattatggccgaagatgactttattttcctatggtaataaattgattagcttaaaccttatatattggtttggttcagctagatgttggacataattgcttagccatgcttagaaacattagcacatgattgggataactaatgttacactatcacttatgattatatttaatggtacccatgatggtcaatcgtgattggttaattaattacttgccaactaaaatttgattaatggtgggttgtgagcacatggttttgatggtcgtgctcatgacaattaaggaccggttcgtgagctactgttgtgagacattaaccatgccaaccataagccagcgtgggcaacggctttaccttttgtatagcatggttcatcacggggtgccagactgagaagcggcgagaagttcgtgggggtcgctggggagtccatgccttgttttataagggggtgattatgatccaggaacggtgcactgtggtgagttgtgttgtgcagaggatattgtcacagcctctattcgggtactttccagtatcgcgacgcatggtagacatgatgttgaggctttgtcttgtgggtacagtggtacacctctggccagagtaaaactattcgaatagccgtgcccgcggtcatgggcgggttgagcaatgtttcttgtgattagtctcacacctctcacaataattattggtgctataactggtaataatttgcttagctcctggtttggagttagatctgtacagccgggtatggttgtttaggatggtcgggcctgagcagcatgggtgtgctgttcagtgttgattaaaattgatgaataattactctactgttttacttctaaatgtttgctaaatgctgcttttgcaaatgagcctatattatgccatcctttggtatccttgtgcacttgcatatttgctgtgtggcttgttgagtatgtcatatgctcaccttgcaataatcaatcaacctaagttgaagaaaaatgatccagaaggagaagacgtttggcttataccccagttgagctgcctgtgggagtggagccggagcttcgctagatcgttattccgctgttgttttttttttcttttgtaagtatgtaacgttattattatgatggatttgtatattaaattatcagtttgtgtacctcggctgattcctggacgaggattttttgcacaaattagttcagaaattactagtgaatttctgggcgtgacagtgatccacatgtcaaggccaacgcgctgctgcaagctcatttttcaaggcgcactatcttggcagccgaccagcgggagatactcctttctgctcatagattgctccaggcaatggttgatgttatctccagcaatggatggcttacgcttgctcttaatgcaatggagctgagtcaaatggtgacacaaggcatatgggatcgtgattctgttcttttacagcttccacatttcaccaaggagttggcgcggagatgccaggagaatgaagggaggcccattgagagcatcttcgatctggctgagatgagcatcgatgagatgcgggatctgttgcagctatcaaaccctcagctacaggatatcattgaattcttcaagcgtttccccaatgtcgacatggcttacgaagttggcgagggtggatgatatcagggctggtgacaatgtaactgtacaggtgaccctggagcgtgacatgacgaacttgccttccgaggtggggccagttcatgcccccaggtacccaaagcccaaggaagaaggctggtggctggtaattggtgatagctctaccaatcagggttgcacttcagaagagggctcgagtgaagcttgagttcaccgctgcttcagaagctgggagaaaggagtacatgatctacctgatgtccgattattatctgggccgtgatcaggagtacgagttcaccgtcgatgtcatggatgctggaggggattgatcccaaggcaggaaagaggatgatagctttgcccagcccccaggttgtgtatgaaactgggtggttgcttgtacgctcgtagcaattcctagaagatatcaactttaaacactaactaattaatatcctatccacacttgtatttgtttgttacttgcttctatcttgttcattttctcattgtaactgatgcgcacctgtgctgctacttgtgctcagccttggggatctttattagcctatggctgcatgtgcttcttgtgatcatccttcatgttgtgtttttgtcttcctgtttcatctaatcaagtcattcatgtcctgattctatctacatcatttgatcatgcttggtcgtattatttgttgtatctcatatgttcatatagattgctccagccaatgcttgatataattattgttgcgcaactgcttgcaacgggtttggcttgttctggaaacaagaagtgatgtactaggagtaggacgtgctgtgcagtgtacagtacaccgtcaatccctaccctgttgctcacatggaccttttggattctcgactgcatgcatacatacaaaactgtcactcttaactaattgttgtttgtgtagggtatggatgtcaaactcaactattgttgtttgcgtagggtatggaggatatagtatataactggatttttaaaaataagatcgaacgtggcaattccattaacaaccaaacaaaggtgaagaggtcatgggctaactaactgtgtgaatagtcaacgtagagacttatcgaaaccaccaaagctaagccagagaataaaaaagctcaacgcgcactcttgttttgtttgctttgcgtacgtaagaaaggaaaaaaaaaaaccttgacaaaaacacatgatggataagactagatggaataatattatattattgcctcaagtataaataaaagtcattacggactttttactagtactgctattccaaaataatatccacaaggtaaagttagaatatgaggagagttagtacttagtcttggaggaaattaagctaagcaagggtaccagcagcaacgccaagccaacaatggaggagacctggctcttcctcctcttctccatctcgctcgtcgccgtcttgctcgccaccgctcgccgccgccgctctagcagcatcaaggcgcgcctccctcccgggccgtcgccgctgctcttcctcgccaagttcctccgcctccgccgctccatcttcgacctcggcccgctcctccgcgacctgcacgcgcgccacggccccgtcatctccatccgcctcttcggcaccaccctcgtcttcgtcgccgaccgccgcctcgcccaccgcgcactcgtccagggcggctccaccttcgccgaccgcccgccgctcccggagctcggccgcctcttcacctccgacacccgcgacatcaactcctccccgtacggcccctactggcgcctcgtccgccgcaacctcgcctccgaggcgctcagcccggcccgcgtcgcgctcttcgcgccggcgaggcggcgcgcgcgcgacgtgctcgtccgcggcctccgcgaccgcggcggcgacggctcccggcccgtcgagctgaggccgttgctccggcgcgccatgttcgagctgctcctgtacatgagcctcggcgccaggcttgccccggaggcgctcgaggaggtcgagcggctggagctatggatgctccgcgccttcaccagcttccccgtcttctccttcttcccggcgatcaccaagaggctcttccgcaaccagtgggccgctcacgtggccgttcgccggagggtgggcgagatatacgtcccgctgatcaacgccaggcgcgccggagacggagacggcgacgacccaccctgctacacggactccctcctccagctgcgcgtggccgaggaaggcgaccggccgctgacggacgacgagatcatcgcgctctgctccgagttcctcaacgccggcaccgacacgacggtgacgttggtggagtggatcatggccgagcttgtgaaccgccccgacatccaggccaaggtccacgacgaggtgagacgccggccggagctaaccgaggcagacctgcaggcgatgccgtacctcaaggccgtggtgctggagggcctccggctgcacccgccggcgcagttcctgctgccgcacggcgtgcagagcgacgcggaggtcggcggctacgtggtgcccaggggcgcggagctgaacgtgtgggtggcggagttggggcgggacgaggtggtgtggacggcggcgagggagttcatgccggagaggttcatggacggcggcgaggtggaggtggacgtgacggggagcagggagataacgatgatgccgttcggcgtggggcggcggatgtgccccgggtacacggtggggacgctgcacgcggagtacctggtggggagcctggtgagggagctggagtggctgccggagacggagggggaggcggcggacatggcggaggagctggatttcaccaccgtcatgaagcacccgctccgtgctcgcgtcctcccaaggccctcctccctctactaatcgtgcttccatggatgaatcatgcatgaagaataacatgccaatcgatagttttgtgatggttgtaaaagcatgtgtagttttatgatacgtactttatgtttaaatatgtgtaatactgttgatttttgaaataatatttcatcattgtcttatttaaatatttagggtaaatataaaaaaacataaatcatgtttaaattatagggtacacataagttgtaataatatgaatgacacatgcatgttttttgttttgtaaaatgaatggtgaatcgtcatatgagtcaaccgcagcgagacgtacgcggtgatttcgtgaatctcaagatataccagttgagtctttgatggtgcttataaagaaagagtgtgcatatgtgtatccatcttatgtttgtactatcattcaaaaaaacaataaccatgaaaaactcaattcatcacccaaggggatatccccttattttcgcatgtcacttaaaaagtcatcaaaaaatatgaaaaaaaatagtaagataaatcaatatgtaatatgtcacttcacagacatacaaatacaaattcaacttatacaagtagaaacaaaaataacaaatttgtgaatttttgtttcgaattgtataagtcaaatttaaaatcgcaggttgcgaaaagatatatcatacattgatatatcatatattgatatatcctgatatgttttttataattttttttgaacgacatgtagaaaacgagaaaatattccctcgagggacaaaattccacttcctatgatatactaacaatatacgtttgaaaacggaacggtgaaataattcattgtagaggaaaatatatagatgaaataattgcctgcggaaaaatactttgggctttgatgggcccgtggtttttcctcgttcagtcggttgtgttttatcgtattttcccctgaattcttgttgtgtaaaggaaaaaaacaaacaaaaaaaaaccattgtagaagcagatgcggcggtttgtgaatttggtggtggacaacgccggcggcggcggcgcgacggcgtacaagctgtaccgtgtcgctgcatcggccctcttttcatctccaccacgtcggcaagcagccaacgtactcgatccggatgacgtggaggacgccgccggcggcctgcctcctccggccatcaccttccacccctcctcattgtccgtcggccctggcaacgtcgatttcttgcgcctctccggcgacgacagccttctcgccctcgacgtcgacggccgcggtctgctctacaacgccgcctccgccgccgtccgctacatgcccgacccgtgcaagcccaagatggagccaatctccttcaccaccgccggcgatagctgcctctacgtcatcgagagggtgcccttctccggtaaccccggctgcttcgaggctctcacctacggcctactccccgacgacgacgactcactgtcctccaggatgggctggtactggcggtctcttccgccgcctcctttcgccaaggttggctacgacggcgacatccaccgccaccgccatcgccgagagtacgacatcaccgcctccgcggtggtgaacgagacggagctgtgggtgacggcgcacggagccgggaccttctcgttcgacacgcaggctggggagtggagggcgcgcggcgaatggcggatgccgttcatggggcgcggcgagtacgtggaggagcacggcggatggttcgggctctcctccacgccggtgaaggggctgcacctctgctcctgccgtctctgttcctacgatgtgccggtggtcaggcgctggttggatggcctagaccggctgccggcggcggcgccgcccaagcgatcgtttctgatggaggcctacgccgtgcacctcggctccggtaggttctgcatcgccaggttcatggaagaggaggaggaggagaaggacaacatctcacttcatccattcttccgcgtcgccggcgaaaaaagcaagaacgacaggttcttgcttctcaccggcgttgatgtggtgggcagtgacggcgccgccgtcgtcgtgcacaaatctatacgctacaaattccaaaacggcgatttcgtttgtggttactctcgactcttttaatttacttacacctctctccggtaaaactacccagtatatttcccttttccttttcatttcgagcgagattacaataataatcttcttcgtttgtaatagagtaataatcgaaatgctgtatatgctccattcggcctttcgtttatattaccaacagacaaggaattcacagccttattaagaggctgtcctcttattatatatgctccttcattctggaaaatgaaaacttttttctttgctagttcgaccgaaggattgaccgaccaaattttattaagagagaaaaggggttataattgtttaacattaagctgtcaaggcaaagtggcaaccaaaccagtcatcacccgaaaagaaaaagggaaaacagaacaggggccaactaatcacatttcccaaaaaaaaaaatcttgcttccttctaatgatatgatgatttcctcttactgtactacaatttggctgatgctattttaatactacttccatattttaatgtatgatgctgttgactttttttcaatgtttgatcattcgtcttattaaaaaaattgtgtaaatatcatttattttattgtgacttgattcgttatcaaatgttctttaaacatgacataagtattttcatatttacccaaaaattttaaataaaacgaataatcaaacgttagtcaaaaagacaacggcgtcatacattaaaatacggagggagtaacaattaaggcaaggtgttgtaaaatttgggcataataagatgatatatcttccttagcagttagcacagcaacaacatcccaaaggtgaaatgtttttgaccggagtgatgcacctgcaacagatattccaaatagattctctctacaaaattaaatttattcaactagttccctctcattgcgcgcctgcctgatgtgttgttcattgtatctcgaaaatcatagttgcagcagagcagaaaaaaaaaatcatttgcagcatcagtaatccgtggttattattattaattgctcacatcacatccggtggctcatgatccagccaacatatatatgtactccaactataaatgggagtagatgagattggtacctgcagtgcaggtatgtgtgtgtgtatatagacgcgagcaaatgagcaatatatatagatggatgaatgatgatcatggcatgccggcggcgtgatcgtgatcgtgatcgtgatcgatggcgaggtgagtggaggaggaggaggagggcggcggctggtcgtcgtcctcgtggcagcagaggcagagcatgccgcccaggaagccgagctgcttgcagcaggcgttgcacttgcctctcttgtagcacaccccctagcacttgtagattgggtagttgcacgtctccgcctccgccgcccactgcatcatcgcaccatctgcatttccatttctaaatcccatcttatttcttttctttcttttcatttttctagctagctatagctgtttgcatttgcaataataatagtattttccatcttcttcttttattgctgcatgtatatgcattcatgctaacttgataacttaaactaatagtcaagcattgaacaggctaactgaaactaatagttaagcactgaggaggaggagggaggagctagataattagtaattaagatgactcacgcgaggcgatgaggacggtcactaggaacagcgccaccaccggcttcatcttcacagtcatcctactcgtacgcctcaatgctcactcgctatctagctgcctggcctcttatatactactcgttgcaagcctgcagctagcttttgacatggcagcccataaaattatgctccagagttaattaacatcgtccttcccattgtaattacaataataggcttaagtaattgtttttcacttttttcttcttttcttcccaaacccccttcttttctttgttttgccttttgtgtaaattttattcctcttaatacaaaagtgcgcaatccttttacgtattccaaaaaaaaaattaaatcgtcttgctgggggtagctagctgtcgtctcctcgtgcttgcttgcaagttactagtattaggagtttctgattatctagcattagcctgctttaagtaatgcgatcaatagtattgtgcgactactatcttaattgagatcgagacaagcatccagttcgttcatcattgatctcttgcaaatcgatctggtacatgtctatgtcattgctcttaatctgcctcaatgactcaatatggctagctcttaatctcagctcgattatgtcatcgaacaattcaagcacttatcttgccatatataccgagacctgatatgtgatagatggacaaattttgaatgtcttgttcgatgcacaacatttggagatgatgcgtgcgatttcgaagctgggacagaatttgtgaagaccaagaaaatgacaactcaatcacaacaaaccaaccaccgcccaggcagatcgcattcagagcatgagtaaataaatttcaagtctccctgttcttttcagaagaatacatgtccgaatgtggtataattaagcctgctaatgggttaaaatccaggccgcatccaccccaatccacctcctctgcaaccactccaccaaaccagtccgctccactttctcatctctaacatccaaattaatccaacccgcaggatgtttgaaaccaacccaacccaaaccattgtagctaagtggattgaatccatttcaaacccatggactgagaccacatgaaaccgccgccgccgccggcggaggaacattgacgcaaacccaacgaacgcatgcaacggtagtagcttgtcgtcgtgctcgatccgtggccgcgcgagcccgccatgtccagagactgcgtgatgagtgagcagctggcctgttcgacgcacacgacaatggctgcccgccgccgtgctcgtggccgcccgccgccgtgctcgcatccatggccgacgcgcacaacaacggcgggacggagctacttcacgacacggaggtgcgcggcgagcttcttctcccgccggtaaggaatagtagccgatgaacctgacctccattgtcgccaagctgagctcgaagagacagccatggtacagccggaagagcaccgcgccgctgctcttggcgaagcactcgagccggacctcctcgtccactgtcaatggcggcggcatctcctccggcgcggctgactccaccaccctcgccaggtccaccgcggcgcggcacgtccacctcgccgcgccgtcgtccttcgacaacgacgacgacagcggccgcctcgctgcgctgtcgtccttcgacgacaacgatcgatatctcgtggcgcctcgccacggccaggccgagcgtcccgtccggctacgacacgaggagcatctccacgctcggcttggcgacgcgttcgaggttcgagggatgagggagtttgatctgcgccgacggcgatgacctgtcgaggcggagcgcgggggcatagcagccgagctccgcggcgttcgagagcacagccagcagcgcagcgtcgtcgctgtctccatggatcgaacccactctagcatccatggatttaatccaagttggacccgaaattttatacccaaaaccaaaccaacccaaaccgttctcacatgcagtccaaaccgccccagcccattagtctcgtcaaaccatttccatccaaccaaagccagcccaaacttgaaaccaatccattttacccacttcaacccaacccattagcaggcttaggtataattaaggggagctccatgcttttcagtgttcttttcaaaagagtacatgtccgaatgtggtataattaaggggagctccgtgcttttcagagtttcagacgaaactgaacacctaaaactgcccaatgtgacggcaacagccaaaatattctgagatttagaggtagcgaccaccggccacatcaacgaggctctcgtctccatgggcaacttactttgttagttcttgctttggaaaaaatataaaattagcaagtggtattttgagaagaaatcgaaatgctaatggcacaggtcaagctagtacttgctgacaatagttgcaatacttctgtcgctatacatagccacgggctcacatactcgtatataacaacaggacttgatcaatttatttcatcatttttttattaccagtattgtccttggagcagcaataacagccagtgtcaacgggagaaaaatattacatcatcaaagccgagtttatgaccctacaaaagttgaattcgctttgcgctctcagtacaaactctccgaatgacatagtttcagctacactcccttggggagccccgtgaccgaatcgatcaatgctaggctttcgtcagtgacaacttttgggccagctccaagcctgctacagatgaagtagctcacatctcccttgaatttttggctcggcatcttcgtctcggcaggagctgggagggcctccacatcttctatcgatttcagtccagcatcgcttagaatcgacttgtcgccaaccatatagctgcatcattttgtttgtcaaatagattcttggatagattggtatgtcatactcatgacaatattaacgcacctgctgagatcattatcttgaggagggaaataatacaagagcttctgaaggagaatggttgcatttttgcggtttggtgcgattaggacagcattgggcccagcatcgaaggtgtaagcaacctgccatcaaaaaaagctcttgtagaatgagaagagttgatagcacaactgtctactagttccatactcgtatagaagaaaaatgcatactagaaaacataaacagtacaaataagtcctagacaaggattttcaatgaaagaacttccttatcacgaagccatattatgtacagccagattatcttgtgcattccttgggcttttgtttccatcataacaaagtaatgaattggtatatatatcatatccaatatatgtactaattaaatatgatcctccatagcattaacaccaatggactgatgacaattagaaaagggtgaaaagggtgtggaaaatgagcttagagtcaaacatttgctatttctacaaagatcattgagcaatgtgagtcatacacgttttggctagggcagtacaaattgtttgtgccaccatatgagcttatggtccattatacccttgttatgaactcagcatgtaaccaaccctatttcatggtatggacatccataaaccgcaacagtttattgagaaaaaaaaaggagaaaagaagagtatacctgtggggttccttctgactggttccacttctccacaaggctaattatcctgtgattaattcagacagcaatgtcaaagctgatgtgtcattagcaacagaagcccaaaacagagcactgataaataaaagatcacctgtgtgatgtatcgttcatatagaagatgggagggctcgtgtccaaacatacagcatgaaattggttgctatctgcacaagttaacctggcaaaggactcaaaattacgagacttgatagcctcttccattttcaacacccgttctggaactacagtctgcaatacaagaacaagcaattcaaaggacataagaaaaaagaagtaacagctaaattgacagaaaagctcaattaatattttactgcagtataaaactgcccaactctacttcctctatgaatcatgagaaatttaaacggtcaaaacagtcacctgggccctatattgcaaaaggggacttgtttcaacactgtctcgcatcccactagtgctacttgtttccttctgctttgaactgacctattttacacagggaagattcaattattttgaaggtgtcagacatgacataattagtaaatgttgttaaaaagcatgataaaatactagagttaccatccgattcaaatttactggttgtgaagccacaacaccaggagacaggagtagtaatgctacaacagattatacgcagtaagaggtatgttaaatgcacatcacataccaccgctatgataataacaagatcattccagtgtgcctcatcagcaagttgtacagctatgctgtcgcttccatcattattctgtaagtgtagtataaaacttatcattactcgctagaaaggatatgcgataaatttcaccaaggctgttcctctttcatagcatcagataactcacttttcccatacaccatttcacgaatcccccatatatactgcggcatgcacttccagacccttgcctgcatttgaatttgtcagttataccagaaggagaaaaggagcagttccatagcatattgatcagtacagatgagtacaagcaacaaaataccttgctatggaagaaagttcaccatgatcttctttcacattcattagctttccaagggtgaaaactacaaaaagcaatcaggtgataaatatgtgcttccattcaccctatttagatttttttaaaaataaaaaaatcaccaataagatgattgaaccattgtctgattttgggtggcattatcaaatttgaaaatatttgagacaaaataagtagggaaatatcattgatatcagaagtaagagactttaccaaaacaagccaagccagcagccgaagaggccaaaccagcagcagtggggaagttgttgaacgatgctatgtgtacatgtagcttcccccagtcctctttcttgatcctgatccccttcttctcatcctcgacatcttgagcacgcttccggatctccctcaggcagctctgaaacctccctcctgacaaggagatctcctgcacagttcaaaacgaaaagccagcttaagacatagtataccattaaaaaaagtaaaggatcatcccttaaggtctagcgtggtgatagatcacagacttttaagtttcacacagtgtaaatctaggatttgacagtttgtatttagataggatcagtgactgtaacagaaacaaagctagaaacacatactagatgctagtgcatatgaaatcaggaatgtgattcttttttaaaataataaaagaatggaaattagagctccactgcctgtagaatttgtagatgggaagaacactgaaacagattgccattattcagatctaagcagcagttgtcatcagtttgatgaacagagtcccattattcagaggggacaacaaagcataaacatcaatgcgaagcaacaacaaaaaaaaaaagtaggaagcagcagagcagagagatggaagagtagagaggaggaggaccttgccgttgagccacatgcggtcggaggggaaggaagggctgacggcgacggtggtggtggcggagaggtggtcggggtcgagggtgacgctgatgctgtcgttgacggggaggatgagcgcctcgtccctcttcccccagtacttgatgacggcgatgttggtgggagatcggccggtggccatgagcacccactgcccctcctccgccgccgccatggaaggagaccgatctgctgcggcccagaagagcgagcaacgcgcgtcagggattcggactagcaacctcaactagatacagtcccaggcagcttaccggaacggaagcaacgacggggagcgggagcagtcgccggcggcggcggaggcgggagggcgggagatcggagacggcggggcggagacaccgaggaagacgagagtgagaccgaatcttgatgctaaatccaacggctgcgatttatctatcccctccttagtatatgttttttcacaaaaacccctcactcgggtcgctatcgcagccagcatcttttgtttttctttcctttttgcacaaagacccctctgaataataataaataataatatgacggctcggttacttcctcctccaagttcaagtccaagctagcgatcgccggcgatcaagccggcgaccatgcttccccggccaccgcgccgcgccgccacccccgtctatcatgatcatatcttctgtgaatggcttttcataagctgttgatccttcctgcagcatctaccaagtgaaatctgcatacacaatttgagatcaacatcgataagatgagatgagatgagatgcacaagtgaaatctgaatgcacaagttgagatcaacatcgataagatgagatgagatgagatacacaagtgagatctgcatgcacaagttgagatgcaggattcctattggattttgaagagagacagataatttacagggggtggattgactgattctcctcatacttcctggcttgaaaacgggaaagcttggagctttcggctctgatttgatccggtcagttctactgcttgacaaactgtggagaatctattccttccagccatatacatccaatttcttgacaatctggaccggacgatccatcagaaaaaattaattcagaatgcaatttggagtgcagcagcttttttggctggcacatcggtgtagtgcatctatatgtgaccttgcaactgtgcaagggtcaaacagcacggccacaagtacttttgttgatgaatcagttattaccacatgacttcgtcaatgctagcccagcaagtgatggaaggaaagatggatgaatgataaggctccagggctcataaatacctgagactgaacattgctcattacagtcttcagatgtaaagcagtgttgttcttcttctctattctgctcaaggcagctgcatccagatcactctactgatgaggaccacgaggatcatctgctggaagaaaacaaagatttgcacattgactatgcactgctgtaattgtatcaatatcgaattctaaatgctgaatgaacagttgctgatatgatcctgtcaggaagcaaaaacaagatactaattgccctcagagacatatatagtggacgtgcactagtgttttcataccacaaatcctttggccactggagtcaacttttgatcatctggataacataagtaaagaagattctatttcctacaagagcagcagcagctaagcacacacatccttttttcctttccagaaaggatataatgatggattagaatattcagacagtagtacagcttcaggattgctgcaagattagtcataaaataatactagtagtagtatcatcttactaccatccatggggttcaggacaaattagttgaactaggagtacatacagctgatacagttgtgcagtgaagcggtgacaattgtcaattgacaaagtgccaaggtctcacagctaatccccagctcagctgcctgctgcccccttgatggtctgcacatctctgcccattgaaatctttggtcagcaccatcctctggctgtcaagagttaggtgcagcccgatttgagtcaaccctttgattgcatcaagcaaaggtatactagtatcaatgcccctttatccaattctgcaaagtttcttccccaacttgctgtgtcctgaacaactggatttcattcggtcatcagcttacacggctggttgaatggttggtcaattgcaagctgttcatctgagagactgaaacaaaaccatttggatttgcggttgcagtcttgcagagatcacagaatgttgatctttcaggattagaaacaaaatgcagcacaaatatgatatgagtatatattctgatgaccagaatcagcacacacggttggttgaatgattggtcaattgcaagctgatcatctgggagactgaaacaaactgtttagattgcagttgcagtcctgcagaaatcaaagcaagtgcagcacagtatcaggcttcatatgacatgaatatatgatgacgatcagagattcagaatcgaaatcctcgtctgaaatttacaatttctgcattccttcactagtttcaacaacatttttttttgcttgctcttcagcacaaagattgaacagcaatacacactaacccaacaaaaagttagtttttacaagcaaatgtacacttcacaggatcacaaaggcagcagcagcagcacataaaaatcaaagaatggtagagtacagaaaggggaaaaagagagatttttttttatcatcctcctaattaaatcaaatcaacagccaactaccatcgtgggtttccctccacggaaggaaacctcagaaggaatggtggtgaggcggcgcgccggagccggacgccgccgccgccgcggcgctggcggtggcgctgctgttgctgcgcgtgctgtgctccatgatgcgcaccacctcgccgcggctggccaccacgcggtggaacacggcgcgcacctgccgctccagcggcgcgaggccctcctccagagcccggcacgcggcggcgagcgcctcggcgcgctcgaccacgtcacgcgcgcgctcatcggtcgcgcccatcaccagctgctcttcctcctcctcctccgcgacttcctcgaggagactgctcagctcccgcgcggcgcgctccacagcctgcatctcggcgaggagccccgtcgccgccgccgaccccgacgacgaccccttcttgtcctttttcctccactcgtcggcgatccgctcctggagagcacacatcggggccgcccactgcacctgcttcggcggcgccaccggggggttggtggccgcggacgaccggtcctggcacggcaccgccgcgaccagcgcccacatggagaagacgagcaccgagctcatggtgtagagcgccagccccagcccgcaacccgcgccgggggaggcggacgtgggcgactgcggcggcggcgcgaggtgcgccgccatggcgtggacgtggcggccggaggaccagttcctggagacgctgaaggacagcgcgcgcgcggggccggccctgcacgagggggacggcgcggcggcgagcttggcggcgtcggggaacagcctggagatggcccggcgcgcgcggccgaagtgggcgcggtgcagcggcggggcgaggaggcacgaggcggcggtgagcgcggcgcggtgcgagccccggagcgaggcgagcgtgagggagacggcgttgagtatgtcgagcgtcttgacggtgcggtcgaggaggtcagcggcgaggcggtcggcgggcggcctggagagcgcggcggcgacggggccgatgccgagaacctcgcggaaggcgtcgtcggaggagagcaccgcgtcgagcagcttggagaggaaggcgagggagaggagcggcgggtgatgggagagggcggcgaggcggtcggcgacgtgggcctggagggcgtggaggacctgcagctcgtcgtcctgcgcggggtcaaaggaggcgacggcggtggcgctgcggcggaagctgaggaggccgaggaagcccatcccggtgggcggcggcggcgggtcggcggcggccatcgtcgtcggggggcttcagcttcggggctgtgcgtgtgcgtgggcttgggcttgggctttgggcctgggccttggtggtggtcgtcgagggaagcaatggtggtgggtggagcgggcggtggtggcgcgcgccctcatatacgcacgcgcgccggctccgaccacgtctcgcgcgcaagagctacctttgactgcaaggtggggccatgggtgtatagggcccatgtgtcagtgggggtggagaggaagaggaggtggtgcgctgcgcggagaggaatgggaaaggtggactggttcttggagctgacttggttgcctcccactaactgtgtggacctggtgtacagcacccagtaatccctttttttttttcattcgctcccattttctaaatactattttgttgcgtattagttattttcacgtatattctgtgtgagtttttttccctggctagctgcctgagattaaggtgttttttttcagagatgttttcgcttcttatcagcgcagtactacctccgtcacaaaatacttatcgtttagagtttttttgtaacgtttaattatttatcttattcaaaagattatggaattattatttattttgtttgtgacttgctttattaacagaagtacgacttatttttttatatttacgcaacttttgaaataagataaataatcaaacgtttgcaactgtattaatagaaatgtgtaatgtgtagtactagtagtatttgttgtttttatttagttgcagctggcagcttaggacaaattgtaccttgaaggcttgatggctggcagggaatgaaaagtcatgaggtcttaagtccctatcatatcggatgtttgaaaattaattataaatattaaatgtagactattaataaaacccatccataatcttggactaatttgcgagacgaatctaatgagcctaattaatccatgattagcctatgtgatgctaccgtaaacattctctaattatagattaattaggcttaaaaaatttgtctcgtgaattagcttttatttatgtaattagttttgtaagtagtctatatttaatactctaaattagtgtctaaagacatggactaaagttaagtccctggatctaaacaccacctaaaggcttaaagcatgacagggcagggcaggccagatggagttaaattaaagccaaaacagatacggttgtgatagaatcatactagtagaaattagaagaggacgcatgcaaagcttgtatcatgtgacagtgagaagccaaacgcataggacacacaccaccaacatagcacaggtatgtaaacacaacgacaaatgctccattttagtaaggcgagcaggatcttaattcatcttacaaagaaaaaaaaaggaataagacagtgtcatgccactacaaaacactagtactaaaataaaacattagcaccaatcatcttctctctcttttgatctcttctctgaagtagtactagtagtacttcctccgtcctaaaatgaagctatttttgaggttggcacggatattaagaaagtatgtgagaatgattggaggaagtgtgtgattggttgaaaagagaaagtaggtgaagaagaatagttgtgattggttgagaggaggaggtaggtgaagaaatagctttattttgggacaagacactgtgctagaaatagctacattttggaacggagggagtagtaaataactagtgtagtttgaccatgtctattttgacgcgagaacacatctccaccgtcgatctctctgcccacgtgtcgtcccaggatgatctgcgccgctgaatagtaagtactacgtcaggacagtgaccctgcacttataattcactaaacgaaaaggaaaatgaaaaccaataatgattactggaggactacttagtttagaagatacgagaaatactcaagctaattaaccttggactgttctcaaaaaaaaaaattaagcttggaccacgtcagatgagagccggccgagcgtcgcgttatgtgctgcatgcttgcatagaccaagtctcctagctagctaattcttcatttaacttaaatttgatgtaattttcacaatacatatgcaaactaactatctactactaataattaaaacgagcttgattgttactagtatatattcaatttatagtacatagtaattagctcgcggttgcactttctgtaattaaattaacactgggcgatcggcttcagctagctagctagaccaagtcacctgcaagctattagctcgagtactttccagtttcaattcaagtcatggatataattaacaacacatgtaacacggattagaaatcaagcaagctatctactccagggaaggcaggctgactcagatcataccaggtcagccaatcaacggccatgcatacatacatcagaataaatattcatgtgatcgcctagcttatggtttcaaatgacacaaagaatttaactcacgtgttcatcaagagaatgcagtttatacattccaacaaaattcatctttcacttcactcgacgagccggccggctgctgctatttagatagtgatgtttcgaaacagagcaacctctcatgactcatcagattcatgatattttctttttcaataatacaagaagaagtaattaagctgatgataaaaaaagatgagcacttacacgtgtctatgcaggtatgaactcaggtgactgtcaatcgacctccttgattccatcttataccatacatacattagctatgattgaacatatgatgatgagttccatgaatcaatggatcaatatatatcgatcgctaacgcgaaaacaacaagctaatgaccaggagaaaattaaattaaataagcaagtgaataattaatcgtgatatccctaagtagctaggtagtaattaattgtaatctttgtcaattgagacagatgctgctgcagtaatagacacgtcttttaccaagaacagccttgcgtgcatacacatcacaatacatcaccatctcctgggatgatcgatgtatacgtacgcactcaccaccactaagggccccttttatttgtagaaaaaatatatgaattttagaggatttcaatcctatggaaaaaaaaatcctatgaaagcctttgaaaggattgaattatatccaatcctttaaaatttctaagaaatgggtaatcctatgcacattttggagaaaagttagccagaggtctaaccacttggaacatttcctctgagcctatctctctcatctgattcttgcgtttttcctgtggtccaatcaaacggccattcatgtgtttttcctatgttttacaatcttctgttttaaaattgtattcctatcctgtgttttttctattactctgttttttcattcctacgattcaaatggacctaatttcagataggtaaagatggagtagtacttcctatatatttattactcactcggtttcatatataagatgctttaattttctctaagttaatttttctaagtttaatgagtttataaaaatataataattcttacaacaccaaattatatctattaaatataacacttaatatatttgatagtatctttgtttggtataaaaatattattatgtttttatataaatttaattgaatataaagaattttgacttaaaaaagatcaaatcaaagtgtagtacaacaaagagagagatagagtagtatgatcttattatggttgattcgcgtgtatggacggtcaggatcgagttatatatatccggccgggtggctgcattctggccatatggacgtcacagtcacggccgtcgcctctgatccgggtcaagcagaataataagaggagaaatgcagctggtcagccccagatgcaaaactatactagctggttaattataattagtcagtctcccatgtaactggttaatcaacacgcgctctcgccgtccatagtaattaccgcagtgataacaacgggacgatggattgctacatgttagtagtacttactgtactagctagctattagagtaagtcccaaaataagtttattttacacccataccagatataccaatacaaaaccaaagaaaactataatatcttatttttatcaaatttaacattttatcttttcttaatacaactattcgtaaaaaatgagggcgaggcccgagcataggcacggcgacagagaggagactactccctccgtcccacaaaacgtgattcctagaagcccgatgtagctttagcagcagtattaaaagattagcatgtcttacaaaatacaaccactaattaacagtaaaaaaaaagacaagcaagatgggtgttttgtagagaaaatcaaccgatcgacgggacggcaacacgacgatcgagcaaggaaaggaattggaggaagggtccggccgcagtcaagtcggcgcgcgggataagatggagacattatctggacgctggctaatttgggatatcttatccggactctcactgaggctcagaattaaggttcatctatctatcaatccctaattatattatgttatatgcctaagtattatcgttgttaatcccttcgattgtccatgggcattttacaagaggcacacggagcaagcggcaatctaaggcatcaagcaggaaatagtcccggaacatcacgatggtttcaagcttttattcctgggcttccaccaagtaatatacgcatgtaatcatcagatgagatgataaaatatatcattgtagtacattgcattatctaaaaaaatcattgtagtacattagatatttgttctctgctagacataagctttctcatcaccatgtacaaatttccgagacatacttcaacggccatctgactgactccacaatacaattgctttgagcccttaacgaccatgaaatgcccattgtacacaaggtaatacaaagttacaaactacagtagcacaaatgattgttactcgtcggctagcaagcaaaaaaaagatcaaggacgcacccccatccatctctgctatcaaatcaagggtaaactccatacaactcaatgatgaagtaacaaaatcaaccgtcctgtagttaaagctatcgtctccgtatatgatggtacagagctaaaatgataaccagctccacaaacctgctgcaaaaaaatcactagccatcaccctatcacgagaagaaccgtttctaaactacaaacatgcctccgcagaaatcatgcatattggactccagcacatggccttgtgcaggctaattttggtgattttcctctgcaggttaactaacacttggggcagacgcctcctcttccccttcatcctttgtcctggtagaatgcaagattattgtcattgcaacatccaatcacatcaagataaatatatatcattttacccaaccaaaggtttgaataatcctagcctgattaatcatggaaagagggtgtcagaaccaggaaatagtgtttcgtttacgtaaaaaatggtgaattttggagagcaaacttgtctaatatttaagcagatcctgcttttcaacagcacctagaggtacagaacttgttctttcagaagagcaatcttattttaccagaaatgttttgtgggcaaacagttttggcctgcagaatgggacgttgcattgaatttcccttgaaacagttttgatacatggaaccgcagtacacagaaatactaacacagtactaactatattcagacaaaagcagccttgcaacaaaaatcttgggtagcattgcagtaggaaagcagaatagaaaaacaccagtgcagcttgcagcgttactttatgcccttaaggaaggtgtgcaagtgggcatgtaaaagttggcaagctttggaagcttaagcagcacacataaaccgagtaaactaagagatgacagaaaaaagtatgatacttgaatacttcactcagcataatcaaactgaatcagtacccatggaaaattgttacaatcaacagaaatatgtctttttggttctctctctgtgtgtgcgtgtggtttgtggggggtgatagaaatatattctgtaacaagacctaagttgatacaatatgcagagctgtccccactaacctttcattgcaacttttgcctgtgatatcgtcaatggcttgatcaagtgcatatagagctatcttcttaacctggtgatgcatattcacagggttcaattagatatgaatgtcaaaaggggagaaactataaaacatagtgctagagctatcacagttgtcaaattattcaaatatgtgtgcagaagagtatggaactgcggataaaaggattagctaacctctagtttatcttcattcaccctatgacccttcggaagcaagcgaaattcttctgtcagcctgatgcactcttgcacattttccggagaaacaaagtcaagtgcaacctttatacatgactgtccaataaaagggaaaaaaaaagcaggttggtaaaaagaataataccacagataagattggtccattttaattcaacacatggtattaacagcaatggtaatggacagttggaaactgcttccatgtctgtcatagcataccttcaaatttctgacttggtggggacatcctgctgggataaacacagcctcaccaagtttctgttcaaatgtccaaggctcaattcctgcatatgaaatgaacaatatatatcagtaagtgagaacaaattacaaaagacatcagtattttttactgaccatgttcttccttgagctttctcttgtgctcatttgttagataaaagcattgatcgtgaataggatgagaaacctgacaacatagggcagttgtgtgagatgagaaacatgacagatggcattccatggacaagtggtagaataactaattacctgtttgactgtttcataattataatgtctaaactcttctgcatgcttcatcagataatcatgcaatttgctgacatcttcacgtcggaagatatcccacaatgcaccaccctctgtctgatttccctcaacaaatgggtgatcatctttgggctcaatagatatggtaaatttgttagtctccatgctggtttcgtttatttcccctgttgcactggaagagcaagcatcacgtcgcctactgcgtctttgacaatcagaagattcagatgatcctacaccatgagaagatttacatttatcttccctcccaaagccattgcccatctcctctcccccattaattgtgcagatagaatggtctgtttcccccttggagaaagtaatatccatattatgtgcatcactttgattgggtgattgcccattagacagactcaagtttccctcagcttcatcagctaccatatctgtatgaacacctccctggtccattacagcaacatttggtgctggctgcttaatgcttgagccattttcaagtcctcgagatcttggcacttcagttgattcactgagagctattgatgtatcatcgtcatggtctggtcgcagaacatgaagattcttgccatctttacgtaagctctctttctttttctctattgctgtaatcctttcagctttgagttctacctcatcagtatgcatgagaatattaacctgtttacgcaataggaaacatgtgattattactttattagtcaaaactgaacaaagtaaacaggtgtataacaaatggaaaggcctgaaatcaggaaaataacacgatgatacagctttttattaaaaaaaaaggaaaatcacacgatgatacagctttttattaaaaaaacacaatgatacagctggatactgtatgcatcagatacattttcataattaaaattaacgttccattggttttttcccatataattcatgacatggtcaaccaactatccagcattgtcagccaccgtagcaagaattaaactaaggagtgcagctttcagcagcaagtaacaagacaacacaagcaaatatcacataattctttttatagatgattctataaatttatgctgtgtttaataactagactagatgttagcattggtaatcaactataaagagaactgaaaaatcaaaaatctaaataagcaacttccaacatgccaacagaagaatatttgaagccaaaaacatgcaggtagaacccagtgccctgaggttgagcaagctttgtcctgcttggttcggtactagtacaaaaattgtccctttataacagggctcactcttaaactaggaaggagctaaatatagtagaataacttgcagacttgacatgactacaatctaaagttaaactaggaaatggcttctatatattcgatgctcgtactgtcactgtagttgtcttccagccactgttcaacggcacgagctaggctcatggggtgctgaaggtctgtaagattttacaactccacatcagtaggcaatgattggccgaggccagcagtgaacaagttgacttgctgttctttcagaagagatggtgaaacctggtacaagagagcaaagaatttttttggtactctgccactatcctagtatggtgtaatagagataattggttcaaggcattgctgtgcattggagagccatagtgcatgttgacaaagtcgcagttttttttccacaagaaaacgccttcatatcatttaaaactgcatatagcacttctgtgcctcgcccatcatgtggtctgacacaagccattccttccctcttcaagagatcacggtccttgaaaaattgctcgcaacgattaaaccatgggagtgggtcttctttgccatcaaatgctgagaaggtcaatttgtggtagaatagcgcaccacacgcatcttcatcctgccctagcactgatgccaagacattgctgctgcggctagtgctggttggaatgaggccatgagggccagggtatcatgctacagcccttgcatcacttgtgttcatggcatcctgcctagaaatgaggatataaatcttcttgcccaggtctgtaccccagctgtttgaagagctcttccagggctttggagttttatatggtggatggcagggatgggttggtcagagggctagggctgctggaggaggagattgctatgatacgaaataatgtagtaaagaggaggaagaaggtcaggaatagaaacacaggcaggtatgaaccagcactctcaggtcaagcagggttgtcctgctcagctagatgctcggttggcaaggatttagagttgggtgaagaccttcagctttattgactgattgctgctagtacaaaattggtcccttcatataacagggataactcttaaactacgaagaagcgagatatggacatatggtagtacaacatacaaacttgacctgaatactaggaaatagctactatatttgatatataaagactaggaatgtatatcctcccagactactgcaggaggccctgctaattttgagttcccagcagccccttcctttccatgtttacgtctccgatactttctatccataacatataatagcatccaaggatagcaatatgtacaatcaatatgaattaaaaggaaacaagattttaatccataaatctacatatacaaatgccagaaatcacaagaaattcacttatttaccgcatcagacatgtcgcaatggatcttcgtaacagaatcacctattcccaactcttgggcgacaccataagcaatgtatgtctttggaccaagatctggctttttaacatgttttggaagcttcactgccagattaaggggaccagattttggatctgtatactcacgaaatggtagtgcagacatgaactcagcaccatgccgcggcaggcgctcctcaaaggaactatgttgtggccaatctttaagcttaagtagcacaggcaaatcctccgaaccaacagctccacgggaatacccctcaaaaaacatgtgaatatttatatcaacctgcattatggttaaatgaaagcaatggtattaggaagttaccagtttgaaatataaagtagtttcaatggtgctgttgaaccccagatatgaaactggcaccaccaacacatcctggtggtacataaactaatatattgatatgtgaagttcataagttctaccactaccaggcacataagctgagctgacattaggtagatatacagttctttttcttttgttgtgtgtacattttcatggtatcagggattccactggcacatctacacacctcaagaaatcacgatgatcaatgtttcaactccacacgtttataattgtactcgtgtagattatgtgactgacaatccctagcatcagctctacaagaggcagcttattgcaattttattaacataatgttacttacctcaaaccatgtcagacaatcaagagctataactgagagccgttcatgctctttcttgtctctcttttcccgtaaggcccgccacataaccattggctcccagctcagtccagaagttagctcaagcacgtcacgaacaatgactggctgaccattcaaccaatgctgctgaaaatgatctaaagctccactttgaacttctctagcagttggacaatatatgtagttatcattggagtcctctctgcaagctgatttccgtgatgtttcattgttcacttcaccggattcagtgaagcaggaacatctagagcctcccaactcctgctctgtttccttattgaccactgaattgactttatccagtaaatcagaaataaagttctccttaaacaaacacctaagttcgagaagacaatccccgcaaccacctgcattaggtgggcatggtatgcttccgttgctttttgccctccatatcaaactaggagtgcaatcctctgaaggagctgcactacctatcaacctgtcattctgttgatcagaagccccttgacctacagcactgctatgactacttccctcttgcaaaccttccttgccttctatttcaggtacatcaacagctgtgtcacaagtgacaacagtaccagtagtaagaccttgacgcaactcctggcagcagctgaggcagagatcatagtgaccacttttacaacttctgtggaagtcaacaatggatgttctgcagttatcactgtttcaaataaaccaaaaaattagatagttcacacttgaaagaacatatagtccacatgctttacaaataaagcaataccaaccagtaaatccgctcatcattattaaactgagcttgaggaacctccaagtcagttacatcgatccctgttgcagaattaggattaggaaccaacaaaagaaacttagtgctaaaagggaaccgtgttaagctatgataatacctttaattgtggcctcaacacttttctctagcatctgctcttggtgaagttgtttcaaccaagggagcaaaaagcgtgcaatacgcagagagtatttaattttgttcttaccatcggcaaactccttgtcaccctgacaaacgcataacagaaaatatcaaacaaaatgaagcaatgaggccaggtaataaaatagaaacgggacaacaaaaaaaagaggtgtaccttatttattacatttgtccgcagacaagtcttacaattgcagttattgtgacaaactggacagcagttctcaaaatcgtcctctgttagatgcgggtacctgcttagatcatgccacagaaacaagcaacagatccatattagtagctaagatataaatgtaaatttgtgcatgaactaacataataagaactgaaagggtgacacaactaaggtgatcaacattgagtgcttttagaagggcacaaaccagcgtttgatgcacttgacacaatatctgtgcctcctgtttttttcagcaccattccggcacctcacaactcttccactgtccttcctttggcactgatggcacatggttgaagttccatccatcttttttgtgtgctgcaaatcaaggaaatcatgatataaggacttagcaatgaattactgacatacaactgcaaatacaccatagagaatatgctgtataaaagattgcaatttccaccttattctccttgtagtctaccgctggaacgttccgcctgtccctgagcttcctgggtggaagttcagtcgaagagggatcagcaacaggacccttcctgcgctttcttgcggttctcgaggcctgagtctgccctgcgccattctcctggaaccaaaaagagatccatcacacattcggaacatggtaaatgtttgcatttccagtccccggcaggaaaagaaaacactaacctcaggagaagcctgcgtttcctcctccttgtttgtcttctcaccgttttcctgcaaccgcacccaataactggtcaagcatttcgtatgcaaaactacatattaagctcttcttaaaaagaagtggagggaaaattcagcgcaattgcagaggaactcttcagtgctgcacattccgtgagcaacccaggcttagaaatccaatagattggtagatatccaatgaaatttgacaactctgtagcttagacaagcaaaatcagggaaatggtcgattatccaaataacagtacactatgattgaagaaaagggagcaaaatccattatccattgcaagcgcgaaaaggaatccaaggatattgcccacttcacatccccgaccagaataacaaatacagaaagaaaggggaacaactcaaagcggcaaaactaacacaccgaaagcaaacatgaagcagccagtgttgctcggagatactagcacgaatccatccgctagggtttaaacgtcccaacatcccctcgacgacaacggcgcgaagaagacgcagcacatcatagcaactccccgggttttccgaggcgttgcccgaaggaacgagagagaaaataaaaaaaaacgagacctaatcgaagcagcttcgcttcggttaccttggcggcggcgtcctccggggccttgcgcggcctcccgccaccgcgcttcctcttgggcggcatccccggctagaccccgcggcgaccggcggcgaggtcggcggcggagaaggaggaaatcaaatcaaattgcggcgcgggtcgggtcgggtcgggtcgatctgtgggcggaaggggattcggagtggaatggaagaggaaggatacatatgacacgacggagcccacgatgtgtgcgttagggcccactggtcagtgaccgtggagggctccggtgggccaggatggtaagcttctgggcccagtttcagcgagagctggagtaggggatgtatggcccactcatcggagaatcgtggccgcgcacgtgtgccgaggagtgtactaggaatggtttgtttatgtttttggttttcgcgggctgtggtgcgacgtgtgagtttgaatcgagcggcggttggtgaaaaggaaaattcgaggtaaaaaaaaaagggactgtctatctgtctcagtcgacagaaaatttggtgtctaatctgttgtttttttatcataagatttcgatcaaagagtctcagatttttcacagaaatactttaaaaaatatatatataatcttattcatgacccattggatacaataaaagcccaaaacaaaaagaagcccaaaattaaaacatgagccaaatccaatattacaaccacatcaaaactgacagagagaattcacgtgaccacattgcctattgaagaaaacttgagaaccaagaagatgctctgcataggcacgtgatctgatcattaaagcaaaaaaagcaactttgcttccaaagagaaaaatcagagcaatagatcgaacaaggaagaagaagatggaggtggaggagaagattgcaaaaaaacgaaggatttagaatctgcaaacaaaattcaagatctgaggaatatgaaatcaacaggtactgaatcttgttctgaacttcctaattcttgaaatcaacactcttctaattcttgttctgaatcttctgaacttccttctttgaatcttgaaaaaaataactcacaaatgactcaagttcatgggattcctgtgaagaggcaaaaaattgcattaatccatcagtcctctatactggcgtatgtaaaagaagcataaaatagcacaacactatatacacagtacttcataactcatttgacaattgatagaatcttcatatgaatctacaatagcacaacactttagactattgacaaaatcttcatatgaatctacaatagaactatcaaataatagacagaatttcatcactcatttgacaatcaaatatgttagttacaggattgcactgttggtattttaactaaattcttgtggacttaagatctctattcatattgcatatcaatttattgggaacaaattcagaaattaataggaaaagtcaatcatagcaaattttaatttaattatagttcaactaccatcaacctcctaactcaaagctttcaaacaaaggagcaaaggttcacatataaaatgactaggaaaacacaactacaaaattcaaaaaaaaaatcgcatggcccctgatacatatcagcaagcaacacacaatgactataagaaaacaatcacatggccctgatacatatcagcaagcaacattcaaggatttactgtccagactgtagacttaaaaacttaacataatcaaaaatttgaaaacttatactctgcaaaattcgaatttacttcagactattaacataatcttcatatgaatccacaacataactttcacataatatacagtacttcataactcatttgagaatcaacaggttagatacagtattgcacttttttgttttcaactaacttcttgtggacttaagatctctattcatattgcatatcaatttattggaaacaaattcagaatttcataggaaaagaaaatcagaacaaattttaattatagttcaactaccatccatccactaactcaagctctcaaataaattattcagagatacaattgtcaatatatttgtactacaataagatagactgtatttgatggccctgattcacatcaccaagcaacacacaaagactactgtatttaaggattattgtccagtttgaagacttaaaactttacataatcaaaaatttgaaaactcaaaacagaaatcattcagagaattcagaaaatagacaatttatttcatatgaactgattagaaggaatttcagaatatcatatgaaaactatatgagataaaaaattacaatacaagtcaaaatgaaatcatcaagtgtactcatcaagtgtactgataatatgttctttgttttgattgctaaatgtttgataattaagtgtactgaaatatacttatgctttgttttcacaggtttgacagatgagaatttgaaaggttttgttggaggtaagaacagacttatatgtttatataatttaatgaggttatgcatacaactgttcattaaaaaaaattactaatttttgaaaattctatgtatacagaaacagcgaaaaaacaacagttgattgacttggatttaaacaaaaaaatttcacaatcaggtgaaaaaacataaattttttatgttgtttatttcaatatgaaatcagaattataatcagaaaatctcattcaaacaggtttacaattaattgagcaaaattacaataggacaagatcatttataatagatgcaaagaaaagtagtacacgatcaagtactgcacagtcaggtaagaacggaaaaaaaacatttgtccatataaatttttatttcattgatatgtttaaattaacttagaaagaaaacatatgttgtgcaggtattttgaaggatttaagagagagagacaaaaacattgagaagaagacaatatcaaaagatgaaggtaattgaaaataaaattacataatttcttttgactaattgtattcagagtttggttttaaatttcataagaaacaaacatcagattaattcaatttttttaataaataaaggacttgggttactggagcaaaattataatacgatgagatcatatatgcttgaagatggcaaaggtgatacaaaaactggtaagaaacataaatttagaaccattaaataaattagaatttaacaataatctgtctattctattataatatgcaggaaacactcaaagagattcagaaattgacaagggaaagagaatagctgttatcgagaatgtaaaaacaatggaaaatgaaagaattcaatttgaagaagatatgttaggtatatatatttttgactacacagaatttgtttttttgtacatattttagattgttttattttttttcaggagaacaggatatgaactatgcagaagaaatacatcaaaccaatgttctatcactattggatcaagatttcattgatgtaattatacattgtcagatatcgtatatttgttttattttgatttggttttaatttaattaatatattttaagcaggataaatttacttcatacactagtctaatggaacatattatatcttcacaacctacaagatgcaatgatttggaggtaatttaacttgtactctattgaaaattagaatttcttcattttttttgaattgttttttaaaaactatttttattctttgcagaattcgatgtgagaaagcagcagcacaaatgttgacttcaattataatttggtgaatgaggtattaaaaaaatttattatttgaatatatcatttagaaaacattaagattaataaaaaagatcaaaaaatcattatgttgaattttacatgagtgcaggttgaacaaaatggaaatgattctatgcagactgtcattgatgcaaaaaaatatgtctgaggtgattccagaaattaattttgaagctcaagttgattctgtacaaccttggtctctagatttgttcaatctacaagaatctattgaggtatgaatttttcatgaatatgtatggttcatatcaattaagattgatataaagataaattttcaataatgtaaatttatggtccaatgtttaattacagcaacagagttcaattcagtctagtgataaaggcgaaagtactactgaagttgatcctgatttgaatgaagaatttctaacagaagaagatattgaacagtttctagatgaagaacaacaggaagcatcaaaaggaaacaatgcaagcatagacagaaaatatattccagagttgaatcagaaattcaaatcaatagatgaggcacagaactacttcaatttttatgcatacatggctggattttctattgtcaatgctcacagtgctagaacattaagtaaaaaaagaaatggagaagttattagagaaacattcaaatacaacaagtatgtgaagtcggattgcaataagaaggaagaaacaattacttctgaaaggaaaacaaatgaagtcatagggactgaatgcaaatgtgttcttgtaatcagtgagaggaattcgatttgggttatatcgaggatagatttagatcacaatcatgagctcagtcctccagatgaggctagatttctaagatctcacaaatacatgtcgacagaagaaaagattctaatcaggactttgaaagaatgccatattccaacaagaaatatgattgtaatattatctgttctaagaggtggtctaacttctttgccttacactaaaaaggatataagcaatgtcagaacatcaataaacagagaaacaagcagtaatgatttgatgcaatgtttgaattttttgaagaaaaagcaggaagaagatcccaatttcttctatgagtttgatcttgatgagaatagaaaagtgaagaattttttttggactgatggaagatctagggagtggtactacaaatttggcgattgtataagttttgacacaacttttttgacaaacagatataatctgccttttgcaccatttgttagagtatctggacatgggaacacaatactatttggttgtgcttttatacatgatgaaacaactgaaacttttgagtggctcttcagagcttttttgaaagcaatgaatggaaagcaaccaaagacaataattactgatcaggatggtgctataagggcagcaatcaaaaatatattcacagaagccaaacatcgaaattgtttcttccatatagtctcaaaagctctgaagagatctggttctctattcaagaagagacaaggtctttatgacatatacaatgatatcatacacaactcattgactgaagaagaatttgagtttctttgggaggatatgattcaagtttttaatttgcaagacatcaattttctgagaaacatgtgggaaatcagaaaaagatttattccagtgtatttcaaaacaaatttctaccctttcattcaatcaacagcactaagtgagggtacacacttagtgctgttggcaattacacaaatcaaaaactgtaattacagagataaaaaactgtaactgatagtagtctatatactaatgtaattaaatatagatttgcaaagtctagtcattcatatcatacaaaacataaagtagaacatctcaatcataccatattactgcacaatattttcatctgaacagtcaggttaaaaagcacaaaaacggtataattatccttcactcaacagcacaaactgtactttactatacttatttcagtactcttcactatacaactgacaaataaaatattaaactgtttgaaaaaaacagtaacatgcagtttcaaacatatacaatataaacaatagctaattaaaatgaggagaaacaatatcaaaccaaaaaaaaagatttgaaaagaaaattggtaagcaaaaataaagacatataatcaaacctattattctgttttggcacaggaggataaatcactgagaatctgttgaaatcaatagagtgatcttgaacataaaggttccaggcaagactaaaatttgaaatctacaaaaaaaatattaatagaagttaaattttgtagatgaataaaaaagctgttatgaaatatttacaaattcataaatgtatataaaactaagtataccagtttaggtcttaattcagcatgatagaagctctcctcatcatacaatgaatccagaaaaacaaatctttcagatttcaaatcaatgacaaatacgaaccagtgacgactcttgacaattgggaaaaagagctgaatgaaaacaaaaaaatacatgaaaaagaatttaagttatataatgcaaaatttagagaaaaaaagtaagaaaataaaccaggtcacatgtgtgaacatgtcttgctagtgaagctccatcaaaacacttctttacagccgagatatttgtcatagaacggtccttaaggagatcatcctaacattaacaaaagaaaaaaaatgagactgatattatttgttaatgtcaattatttataaagatcaatatagaaaacaactacacaactacagtttctgtcatattaacttgcactacaatggtattatttcataagaaaaaaattaatactaaataaaataaattacagtcaatttctattgcaattacagaaaacaaaaactgtaattacagagataaaaaaatgtaactgatagcagtatatgtactaatgtaattaaatatggatttgcaaaagtctagtcattgagatcatacaaatcataaagtagaaaaactcaattgtaccatataacagcaaaaaaatattttcctctgaacagtcaggttaaaaatcataaaaacaatttaattatccttcactaaacagtacaaaaactgtactatactatacttattttagtactctttacaatacatctgacaaataaaatatgaaaaaaaacaagagacaagcagaccctgcataatcctagtaaaatcatacataaccagcgagcaaacaaccagtaaatcagaacaaacagcaaaacagaaaagtcatctcaccaaaaaaaaaatcataacttaaaaaagaaaaaataatcataaattcaaaaaggatgccatcagatattaaagaaacacgtcaaagctctgcaacatcatcagacaagaattttaattattctttttaattagtataattaatattcttgcctgatgacgtgctgaacttagatttgcttaatgtagaagatatttatcatcatctggcgaaaagaaaattaaaataatgaaccaaaaaaaatacaaaaattatctacactgtagtacaaaaagacattagaaaaatcaattgactatcaatcaccactaatgttgtaacaagagtgcagaaaaggggttcaaatggaagtttttcattgtgtgattagtaagtaaaagtctaaacatctaatatgataagcaataaaaattgtaattcttggttgatgaagcagaagaagaagatggagagaaacacatcatatataataaattacagtcaatttatatggaaattacataaagcaaaaaccgtaattacagtaatacatttcggtaactgggaattaactatagattaatgtataaaaatgaactgttaacaaaatttgaatattgatttgcaatgtctactaaatcagatcatacaactcaaccaatataactactaaaacaaacatagaaaataagaagttattttacttagaagggcatgtttccttgcttcaagttaagaaattctttctttttgatttccatgagaccagcagggatgtgagcagacctgaatccctcacggaaaatagtccaagtgattggctcgtcaggaggaatgagagttttgtatgtctcccaccaagcagctgctgcaccttgcaggtagtaagcagcaaaggtagccttctctacaggatcacaccggcaaaggttcagcttgatttcaatatcacgaagccaatcatctgctgcgagtggatcagccgcaaaggagaaatgaggtggatgtgttcgttgaacatctgctagcttggagggtgcttgattggcctgctgtgccatggcagcccccatgttttcagagttcgctaccatcctttcaaaaagtcggttttgattagccaggagttgagcaagagatggttcatcatcatgctgttctgcagtggcagcacggcgactacccccggcacgtccagaagaatgtaggccagtgcgaggctgactcgctccctcaccattggcatcatcagtaagagcagccatagagcgagtatgtgtcatcctgcactcaaagtacaaaagtacatgagctgcttgagcatagaattggcatatacattaccctaaataggtagcatacaggaatgatttcttatagccgaatttacaagtcatccatcatatatttgcatgaaacaaatttctggacagcaagcaatccattccaaaaggagcataagttcattccagtacattagttttaaaggatctaagtgatcacagatacataggagtggataatggtcataagaaaccaagttcatgccttggtgttacaaaattttgaccgttaaaaagattacatattagggtgtcatctcatacatcttaaagaaaagaaatgaaagttacaccccatacatattctttttccagtacaccattctatggaacttcggagaatccgatgggaggttgaggcactgtggttgacggagtggccatagtcaaacggtattgtctcccattccgctcgaactcatagaatggccccagcagcaccggatattatcaattaataatcaaatagacaaatattagattaaaaaaagaaactacactatttttagatacttactcttgaaaattactcttgctgatcttgcaaacaacattataaacttgtctatcatattgtgtcactggaaaagaatgtctctcagggctgtatggatctgtatagtatctagctggttgtaaaattcttctgagatcatgttttggtttttgacttgtgctgcactgtccaacagatttatcaacattgcacaacagaatcctctcaggactgcctgtagacatcttcaacttcttgtctagtttaactacaaatgtgttgatcttattgtacaaaacattagtcttcgaagttatgtcaaaacaattgtctggacattgtttttctccaagaaatatgacatcaggtgaatcctaaataaaaatagaagaaaaaatgagaaaaaaatgtatttattaattttaaacattgttcttgaaccaaaacataatccactacatttcatttcaaggtaaaaacagaattacatagcttcaaatggcagaaacaaaattttcaggaaagcacttttgacagcacaaatcaaacagaaaaaaaatttcaggaacacacttttgacaggcacaaatcaagcaaaaaaacaatcttcaagagcgcacatttgacaggcacaaatcaagcagaaacataatcttcaagaatgcacatttgacaaaaaaagataaattcataatatattagtaaaacaaaaaaaaataaaaataagaaaacatacctttttctgtagttgttcaatgttcaagttttcctcttcattatgttgagtcaagatttcagtatcggtatcctccaaagttatcattactaacttgtcctgtgaaatattaaaaaataaattttaaaaaagtattataaatgtaaagctttgtacaatttagaaagttacctcattagttgaatcgttcaattggctttgtgaatcatcatcgaaatcttgtgacaggtcctttggaatgatctggattaacataaaaaaaattttgagatgaaaaaaacagataaaaaaacatataaaaacatacaaacaggacaaaaaagaataaggaaccattacatttgaattgtcttgatgtttgggtgttacttgagtcctgaaatgtttttcttcatttggaaaatcatcatctgaatcccagattttaaagctaggcttctcatgacccaagaatattgattttctttcattgaaaccaacaatgcttgatattgctttctttggagaagtattactgagtcctgtttccaaatttagaagtaatataactgagattgataatttgggaaaaaaataatcatcaagaaatttaaatttaaaaacaaaatatataaaatagaaaattgaagagaaactaaaatttacctggcttggaaagctttttcataattccatcaacaacagctattttatcctaaaaaaacaaaaaataaggcatatttaatcaatatgctgacataaagaaaatctaaggcagcaacgtattgaagtttatattatgttttgcttttcacaaaaatttaaataaagattataactaaattggaatgttcatatcaactaattaggggcaaagctagaagttcataggaaaaattaaattatatattcttaaagaattacaatctaaaatatgtactaaaagcatttttaaaagaatctacaaaatttcaaaaatcatattacttcaacgagactaaactagcaaacccatcaaaagtagatattgtacggttagaattcagaaatattgaaagcaaaatattatacagttagaattacctttggagaagatgatattttcataggagtttgctcatttccaattgcattatcattacaggtattctggtcttttaccattgaactatcatcattgaatttactcttgtcatcttcattcagattaacatctacataatttaaaagacaaatgtatatatttatgagttgtaagttagacaaaattgaaactaaaagttctgttgttgctggtactaaaagtaaaaatgcagcgattaagaagaaagaatatataatgataaataaatattgaacagtaaacaaaatcatattcaaaatttaaaaacttactagtgttttcaggaacaattggcttgctattagataaaagaacaaagacatctacaagaagattctttgctctttcatcaatgcagttctcatcaggaccaaaatgttgaataagcaattcattgatcttgtttttcatatcttgagttaaatcagcaccaactgaagaatcaagcatatctagaaagcttctctcaataggtttaacaggaacattttcttttacatcatcacttccaatctaaaaaaaagagagataacataaaatttaaaacatgaaacaattatattttttaaaaaataagaaatagatttataagtttaccattttgtaacagcactcagaaaaatctttaactggtcttttgccatagacacctttgctgattttatcaaactttgaaatttttttgatcattgaccctttccatacttttattcttggaacatgtttcagtactaatcgcataccaaaattcagaaaatccaaataattcacctattacaataaaaattaaaatgaataagtaactggcagaaaaaatagttttaacaaataattgaaaaaagagagagaaataatactaaccaccagacaatagaagcaacctccaaaagtttttgacttgtcaagcttgctcagatgtttcattaaccaatcaaagacaagactgctccaatccaaattgtcaatacaactaagatcttcaaaaacactcagatatttcgtgctaggttgaagagaagaatttgggcacaggaagcaattcaaggatacaatcatgaaacacattaagatttgttcatcagacattgtttcatttttgataagcttctctccaaaatatttgacagagggcaaagaagagaggccgaaagagtcaagaaggatctgtttgccaacttcaaaatctgaactaatcggtaaacctccaacatgcaaacccaaaacaatatgaactgattctttggaaagtggaatgactttatctctaacgatgatatcacaagaggtgacatcaactctttgtgccacccataaagcaaatttatatggcacgggacatttttcaaagagtaagagagttttgaaacaggttttggaaataatctctctctaatgttcagacaatgaagctagcacatgagaaaagtatttcacagaaaaccttgtcagtttagtatctaaagttgcagcactcttcattggatttttctgcaaaagaaaagatattttcattaaaaagtttttacataaattttgaaaataataaagacaactaataacatcaaactaatttaccttgcttttatgagaatagagtttccttttcattccatttagaacattatctctatatatctcaagcaaggctgaatccaacttatttttgaaatcaacatctactgtttcggtttattttctctatcaaaaataagagaatgcaaaattaattttttaaaaaaggagcaagacaataaaaggggtaataaagaagagagaaatacaaaaaaagtatgagaaatgcacaagatctaatatgattaagattctacattattggaattgttgtatagaaaatgacatgtttcaaagttcatcagcagatatcaaattcaaaaactaaaaataaaatgcttctacctttagacaagcagataatgtatcccaattaaaactctacaaaccacatttatgtggagtgccctttttacattattttctcaaaaatcaacagcaagacaagtactagaaaaactgaatgtgagcacatattgacaattaatgacataattgcagcaatgctctaagaatgtagaattgatattgcaaatttcaagtattgaaaagaataagaaaaaaagttaaaggtatagctaagggatataaaacagaaagcaaaagccaaattacagtcaattacagtgaatttatatggcaattacataaatcaaaaactgtaattacagaaaaaaaattatgtaatagagagaagtctaaaatttaatgtataaaaaagcaatgataggaaattataatagaacatataacttaaactaaacatagtgttgtaaacaaaaaatgcaataatattttgttaccttggaagtgccttcatcagtatttttcttcttactcaactttcttttcaaagagttcaaaagttcatccttagaaattccaacataactagattcggagtcctacaaagaaaattaatgaaatctaagaatattcttacaaacaatgttaaaaaattatttcataaaaacaaacctcattgtcacaaaattcatcatcatttggagaactttcatattcagaagaaatagaatcaccaaaaagatctttaatatcattaggattacccatctattaaaaaacaaaaaaattgaattaaaataagatagagaaatacacaaagcatgcatatcagaaatcatatatacagtcacaggttcacatcacagtttcacaactcaaggttaaaaaaatgtacagattttaacagtaacatgcagttgcaaatatatctaatttgcaaagtctagtcagaagcacaacataagagctaaatcaaagcctatattgcatataaactaaaaaagagggtgattcgtcaacattcgcacaaaaaatacagactacaacactacaagaccttcgcaatcttgagctcaaatcacaataatggcacctccaattcgaccacatccacttagtgaatcaccaaaaccacccccacgacaaacaccacaaaacgacagtcactagaggccaggataaatcactaatgaatcattgctgaataaatcattcaaataaataactactgaatcgcttgcaagagctcaagagggttattgagtggattagtgagttaacacaagaaacagtatccattaacagattcaagcaaaatgctgcatttgttaattcataaacaaaataacattaggaactagtagtttttggtcatgaatgcaaatgcaagtatctctggaaaatatgtatgaaaaacagataaacatgcgctgcagttcttaatgaacatcataacaaataggctaaaattctaaattaacggcagaacaaacagattctgcacaacatatgagaacacactaagaaaaaatctggatgacttgtgaatgacaggaaggaattggatactcaaacaaaaaaggggaataatgccattgacaaaatgacttgtaaatgacagtagactagatcttattttgtatgaacaattagatctacacctaacaacctaaaaatatcattaacatctaagccataagtgcaaaattagcttctgaatattggatcaaatgaaccatgtcactgatttggattaaaaagtacttctctaccttaaaacagaaataaaacaaacaacaacaattgtaactcaatgtctcataacacattcagtaactggatcaataaactacatgattcacaaaataacagatccactgaatccaaacactcaaaactcacctaagataccagcttcaaatctaagcctcagccaaaagtaacctacaatccaaaacaaaatagagattaaacctaaaaacaccacagaaaaaacaaaaacacaggggaaaaacctaaaacgttgtagagctgaccagatctgagactcgaaacaaaaataaaacgaaatcctcacgagacaatcacgagttcatcacgagttcatcacctactgcacatgctacgactacacaactcatggagttcatcacgtactgcacaagctacgcatgttccaaaccctaacccgtgttgtccgatcaaacaacaacagtgaaatcctaaaaaacaaaaataaaacgaacaaatcaaactaaatcctcacgaaacaatcacgagttcgtcacgagttcgtcacctactgcaaatgctacgactacacagctcatggagttcatcacgtactgcacaacaacagcaaaaacacgagaaggatggggaaggagacggtgaagagcaagagagaagaaaggaaaaactcacgaatcaaatagaggtcaacgagcagctctacatcagcagaaaaaggacgacgaactctccggcgaaaatcctcaacaccggctagatctacgccggcgaaatcgccgtggcggcgaaatcgtctcatcacaacggcgaccttgccgaagcctctctgtctctgtgtgtctctctctcccccagcgagtgagtgattaggggagaaatatcaggacaaaagtgggacccacaaaaatcacggagaaagaaatgcaggcgcggagatcaaaatttgaaaagtacaggtgggacccacaaagactgaaaatgttaggtgcgtctctggaaaaatcaagtgggacccacaacagcccaaaaaaaacaggcccaacaacccagtcaacccagaccacgaacgcaaaaaaaagcccatatgaagtaaagaagtccatctctcagcacgaatcttgaacagatcaatggcccaaaaaacgacagattcagcccaaagaaaactgtcgacagaggaatagcagttccgaataaaaaagggcgaaaatttacagcagccgacgacggggcctctcgaaaacaaagagaaaaatgtctcaaatttgggtggaatacggtcttgaaaaatatctcagattcactgtgctactacttactcctacaggaaattggattattattgtgatgaaaagaagcgagaaacctaattcgcgcgtacgcgttgccgccgcgcacgccggcccactaaggcccatgcacgtaagcgcttgtgcttctttctttatttctcttttttttacaccgccgtttcttcctttttctttattttttcgctgattgttattcctaccgtacagatagattagtctcctatttttactagcgattagtttactagtaatttttaaatcttaactttaaaatttttaaatttggatatgaaagttttcaaatctcgagttgaaagttttcaaatctcaagttgaaagttttcaagattttcaaatctagacttgaaagttttttaatcgagttgaaagttttcaaatcttgagttgaaaatttttaaatcttaagttgaaatttttcaaaattttcaaatctggacctgaaagttttcaaatctcgagttgaaagttttcaaatatcaagttgaaagttttcaaaactttcgaatctggacttgaaagttttcaaatccgagtgaaaagttttcaaaatttgactttaaaatttaaatcttaaaacaaaagttttcaaatctaacttaaaattttttaatctattagtaaaaaaatctccgaatttttttttgagaatcttccctaattactcgtcattaatgttaagtgtatgttaactaatactatagagtagttaggaaggtaatacagagtagttagggaggtgctcgctgctggcgcgcacgcgccagctagcagccgcagaagatgcagatttggatcgagcctgagaacatataccacatgggccgcaagattccgtggcccgtgggcctctgatgatagcctactactgtagtactgtatattgcccaatcaagacagtagtgtcggaatttttttcatttttaaatttttttcttttaatatttacagaaataatctatcggcgcaaaaaattacagaaataggccctgccgccctagtggagggcgacaagctgacgtggcagacggcggctcgacaacgccgtctgccgccgtctgcgaaaattgcatttagcctagggcggcaaggggctaaatgcatttttcgcagccctaaagagcatttggctcatacttttttgcatctgggtcccttgccgccctagatgcaaaaagtaccagccaaaaagtactaggcctaggctggcggcaagggttttcgtgcaaaaaaaaacctccctctcccgtctgtcgtcaccgcccgtctctcccccgtttgccacgtcagcttgccgccctagtggagcgcggcagggtctatttttataattttttgcgccgatggattatttctgtaaatattaaaagaaaaaaatttaaaaatgaaaaaaattcgtagtgtcgtcgtgcaaagcctgtaagatttgtcggtttggaagttgcaacaacttttgcagtgagctgccaaacaacctgtctcaaaacaacatatgcatccttcatccagttgcaccacctatctcccagttgcctatactactactgtactgtatattctactatgactctggtatctgctattctgttacacatcgctaatgctcagcacgtatctactctatcgatctgacaattataaaaaaaaaagataggcaggaaaaaaaccatcgtatcatataaacaaacaaaaaaaactcaatcatatcggtcgagaaaaggcaagaaccctaccttttcacaccgtcacacgagtactcatcccttaggcctaatcggtttagaagggattgagagaaaataattccacacctcaataggtgtggaacaaatcccatcatatccctgcctaataatatcggtctgtcaactatcattggataactggaccaaaaccggccaccgaacaacgtcgatgcgagacagatagcacagtactcctactatatacataaactcctctgaaactgatcaatggagcaataaggtcatcagacagtcatcacctcacctcacccacccacccccaccagctgatgaaagccacagcacaagcaaaatcacaaagctggtatacagcacagcagctcagacataccctgaatattcattgatcattattcactcatgtaccagaaacatttcttacacgacaagggaacatgagagagcatatgaacaccagggatcaataaatgaatgaatctagtgacaaacaaatcacatcacaggtggtaacagtagtagtattaattcatcatcaaccaccagcacaaatcaatacattatccaaatacaacactaagaaccagttaaaactgtgggggagaaaaaaaaatactcgagataatagcgagctgtaattcacaacaatggcattttagaatctcaaacggcaaacacaatcatcatcatattcttcctagtctacaacacctttacacatgtggttttttcttcttcttccctttatgttacaaaggccaccctccatcaccaggtgaggtgagggtgtgttcctcaactcctgaagccaaagttggaccacctcctcccagcatctttcttaacacgctgcgagttggtcacgaaaaggttttccagcgatttctgcttcctgttccgggaccgccctgcctccttcagaagctccgcaagccttagcttctcgtcctcgacatccgggtttgctgtgccgagcttctcttccctcaccttaagtacgtgttccagtatttcaatggcgtcctcaaccctgaaggcaaaagggaaatgcacttactcatgtatcaagttaaaatattggaaatctaaaagaacaaattctatctgttttctttttgcacagggaaaaacaagttgtggcaattcctaaatttatagatgcaacctcacaggtatataagcaatcaatacacccactcaaaaaaaaggggggaaaacagcacgcctgtaagtttggaaatcgactgagttgatgcaaatcaccgcaggttaatagcatttcaatgaatagtttatatcaggcaactttataaataattggacagttgtaatcatacactggcatgcagcaacatgtgggcaatttgatggtggtccactaaactaaatgatgccttcatttatttgttgattgattgcaatctctttgttaatgccatcgaaattatgcaaccttacataggatgataatctaattgatcaaccaatcttgcctatccatccaaataatactacacatgaactaaccgcctatccatccaaataatactacacatgaactaaccaacattcaacatttcacggattattagaggaggaaacccataagctgacaccttcagatagcaaaacaaattcaggggattacttctacagctgtgaatgataagggtagatgccaacataactcaataagcatattcaggtgcttgtcaatggcatttcttggattttccccataaccatcaagggattgctaccaagatatgatttgatcctaattctatatgaaacagctgttggttgaggaaaaaaaagtttctggtatgaacacatacctgcccatagcatcgtagattgcagccaaattactgtagacgccgagagtatctggatgagaggcaccacactcctgttctagaactgcccttgcctcttcaaacaactgtgcagcctcatcaatcttgaatagctgcacacaagctagccccatctggttcaacagaactccaaaaaatgccgacttcctctccccgctagctctcaatttggcaaccgcattttcaaatgagttccttgaatcggcatacctccctaccatgtagtacaacacacccatttgtgcctcgatgccagcaacagtgctccactgtcctggtgagtcctcaagcaactttagtgccctttgcaaaagcttcagtgcctcatcaaggtctccaagcgcctcatagatggcagcaatctccattaggcctccagcaacctcatcaggggcagcgccaggcgcgggctttgcatagacacggagtgcattctcacagtaggatttggactcgcggagcctccctgttcggtggtaaaggtctgcgaggcggacaaagacagatgcaaccgaagggtggtcatcaccacgggcagacttgagtactgtcaacgccttctggtaggagaagacagcctcgtcgaagcgggcgagggcaaggtaggtgttgcctatcgcgacatcgatcgtcgcgacctcaatgtcacgtccattggcgaccatggtcatggaggcaagcacaaggtgctccagggcaccatcatagtcacccttggcgtcaaggatgagtgccatcaggcggcggtcggaggcctcctcgagcgaagcgggagcgctgtgctcccggtggatctcgagggctttgcggcacaacttctctgcttcatcgaactgcagggcttgcacatgcgcttccgccaaatacctgctcatagtgcaaaataaatgttgtgttggtcaagtgctagctcttgcagattattgttacttctatctctactttttttttttttgcataataatgcgatggacttgatgaaatttatggcgagatcggcggaaatcacaaaatagcagagggaaattaaaaaagatgtcgcttttgaagaggtagattggagttgaaaagcaaaatggcgtttctaacttttaagagaggagatctagatcgagaaacgggcgagaaggaagggtttttgacctgcaggtctcggcgacgcggggatcacgctcgccgagcgcggccatctggatctcgaggcccttgccgtagcaggcgatggactcgtccatgcggccgagcatggcgtgggtgtcgccgagctgcatccagccggagaaggcggcgagggcccactcctcccccttctgctggtcctcgggcggctgctcctccgccgagctctcaccctcaggcggcggcggaggcggaggcggcgtgacgacggcgacggcgcgctcgaggacagggatggcgtcggcgtgcctgccgaggccgcagtggatggcggcggcgacgtggaggctcatggcgagctcgagctcggccccctcgccgcggcgctcgagcgcgcgggcggccctctcggcgaactcgagcgcgcgcgcggcgcccccgccctcccccgagaccatggcgtcgcgggcctgcttgagcaggaagggccccagatccgggttgtcgagcgccgcctcgtccgtctccggctgcgccgccaccttcctgggcttggcccgcgacgaggtggaaggcgacggcgacggcggcgcccggctcctgggcagcggcgacgacagccgcctcggcggcggggccgccaccggtggcgagttgtcggccgcggcgaggcccggcatggtcgggtgaggcgagcgcgaggtggggagtcagagagggacacagctgcttggccttggccttggccttgcttgcaatggaagagaagaagaagagcggcgcggcgcgggggtttgggtggcgtcataatgaggagagcggcacgagtaattaggcagcggttgatggccaagtttagtcattaatcaattaattaaggtcctcgaggtaggcaattaaggtggctggttcatctctctctctctgtcgcccaagtcttctcgtgtacctagttgattcgtgtactacggcctaaggctacaatgtactgtggctgtgtgcctgtgtgatgcgatggtgaatgggaatgggcttgattagggttgattgtgttgacctgtctcagaatgacaggtgggccatgcgtggttagcttgtgattaaggtgacaaattgttgggggtcttcatccatcttgatcgctgacaaatctgcctggtgttgcaggcatacagagcataactgagaaaaattattgttacagattactgctccctccgtttaatgtttggactttagagaaggcgtcatttattgagagtatatattttgacaaataaatttaaataagtggcctagataatacactaggaaaattatatttttttaagtgtggagcaaatatttcgtttaaatggttcagtaaataatctgaaaataaatgcttgacttagctactcacttgtctattgtaagtgtattttccgaaccactaaacgatgtatttataaatattttttacataaatatttctttataagtatcaaatattttgttcacgtttataataattagtatttaattgattacatgttaatgttaatgattttctcgtttcaagtatcgtcttgacaagcacagggcactactacccccagctcaaagctctgaaagttcgcttggtcggtatcgacactgatcctatgatatctgcttctacgttcgtatacattagcatgtagtttaattaattatatagtacgtacagtacagtgtatgagaaacattataattaagtagagtaggaggaaggattaaggaaggagtgcattacattacgcatgcatgcctacttgcaagttgcaaccaccatcggaagaagagatacaacgaaaatgatgaaatggatcatggaggatcatcagagctgtaatgcttccctggcatgcacaccctgtcatgaactaattagctcgatcatcacactgtatatgtttgtatgtcctaatcattgttttcggatccatccaaattatcctgacagatcttaaaacacagcccatcacaacgctggtttcgtacatggatatgttcttttcagacaccaattgctgacagtacattagtgtactccataggttcatcttgctgctgccattacttgagtgtagacaaagaaaggagaattattgctcgtgcatgcctcggttggtccgacattttcattgccattcgagcaccctatggattacagactgacagttaaattggttcgctaagtgtgatcagtgttcagtaacattttgctctgttcttatctccaagttcccaacccatctccctcgttttccgcgcgcacgcttttcaaactgctaaacggtgcgttttttgcaaaaaatttatatatgaaagttgcttaaaaaaaatcaaattaatccatttttgaaaaaaaaattagcaaatacttaattaatcatgcgctaatggagcactccgttttccgtgcggggagtttagttcccaactccccctatccgaacacagtactcctccgtgaaacctgtcggtgtaaaatccgaagagaagttgtctaacatgttggtgggccttgggcctcgtcgtgggctttagatttaggttgaggcccacttatcaacaacaaatagtacaaaggccacaacaaggggatgacgaactgccgctgctactcgccgtcgccgtcgccgtcgactcctcgtcgccggcgtccccaaaccaagcaaaatgccatctccgtctctcctcctccaccaccaccaccaccgcctctcccctcgcttcgccccctcccgctccccctccccccgaaccctatcgctgcatcctgctcctcgcctccgcctccgcctccggcttcgcgccagcgcccgcggcggcgggggcagcacacgggaccacgatgacggcgcgcggtccatcccgatagcgcggtgctacgaggcagccctcgcgcgcctcgacctctcgggaaccgcgcggcgggagcaggcggtcgcggcggcggcggcggccgatggaggcgcggctgccgaggctcacctcgccgctgtcgccgacgccatggtcatggaggccttcctccctggacccgacggcgcccggcgcagcgccatgtccacacggctggtgagcgtttcggggttccactcccacctgtccctgtatcttccctttgctgatttgctccacacaaccgattgatgatgagaccaatgtatttatttgttcccttacttgtttactgcttctgcctagtgtgatgctcgaagttgcgtcctaaattccacccggactcagcatcccatcagaattagtgtaacgcacctatatctatttactctaagctttgatgctttattttgcgctaaattcggagtattggttgctctggatttcgtcatttcatacatattacgtgaaatgtttgttggcatgtacacagcctattcaccacacggtagtacatatgatttttaagaacctgtacagggtgaaacaactaactgtacatgctaagttcaccatgtaaaattaatctcttggaactattggttggtactaggagtccaagtgcattagtgactcagtgtctcagcgcaagtggccggctgggaattttatgatacaatagaggtgcttgtacttgtagcttaacaacaaatcagtatctgtgcttttctatcatgttgtgtctaggaagagaacttattgccagttttgtatatatcgaacatggttagatgctttaatttcgatcggaatgtctgtccttgttggatcatgaggaagttctggcatttcattgtagattttgcaagcaaatgaagttacagagaaggccagtaagctaaagaaagaccttggcactgaatttttctctgaaaacgaacctgatgcagagagtgttttggcaatggcctttaagcaagttgtaatggatcagctcacaaactttcggcttgaagtgttctccccaggttcagagatagatctccaagatttgagcaaaccccgaaaggtgttcctctgtaaagtttgggacttgtatattattttgtttcgtttgtttgcttgttgctaatttgtggatgcacaccaggtgcctgcggattttagtatcagatcatcagatgaaaaacttctagctgctcttgcggaagccattttctcctgtgtcattgaggatgccagaaataattacctagggggcactggtggtttgtttcataagtggaagtcaaactgctcattggattcctctgtttgcatagacataatttctgagtcagaagtagtgaacagtgctaggaggcgcttagatagttttgatcttgtacagtcttctcatgtagcgggtaaagcaaagaatggatggtggccagctccaaagtctgaaaggttagtgaagattggtggccctgattttatgctttgggccagtgagtttgtgtacacatataaactacaaattgatgccaaagcattcaagaatacaaagcttgggggtcatcatgtgttagcaaataataagggggaagttctcttatcccacgcccaaatggtacattattattctctccttgtccttgatgtatacattacttgttgccattcttatttattgtatgctattctccatctcccaaacctgtaggtggagttagcaaatattctggacatgtattttgaagatcagttcacattacctggaaaaaccttctattccaactggaattcagaaccatcaaagattaaaaagaacaatgtatgctgctattttttatttcagagcttacttgtgttaaatattttttttttatttatgttcatcaagcattttttttggtgcagggttatttgaacaacctttttgctttgttggctggtagctctattgtttttcttgtcggcgccattgctcagttatgctggcctcagtctcttaaagataaaagattggccactgttagttcatgtgtctcatcatcacagagctattgttctgatatccactctctagatagtagtgaggtatgctttctagttcttgaaatgttgttgcttgcccagggagaatcctgtttgtttttaagtgtggaaacactttggtattttatactattttctggatttttttttacttgataacccattcacaagacattgatcgtcattgtgttgtaatttagaaataactactcaactaattggaagtgtcccaaaccttttgatagtgcaatattgttctctacgtccaaatcaaagaaaaggaaacaagctacctcgatttttagttgctctgggatattttgattgtctgcattatcctatgcaacatagcatgtaagagccgctgctttaaaaataaaggatctctaagaaatggtctgaaactctgcatgattcatgtagaagtcatttcatcaacttgttatggcttcatgatgtgtgttcccattaggaacatcatgtagcatgtctcctttttgaactattacccttttgccagcaaacctagttgctgtttaaatttaattaagggcatatctggtgacaaatctatcataactactttgttgattatctaacatatctgttgtatgcaacctatttacccctgggcagttgcaggcttactgtgtatctgttgttgagaaaattaaagactcatttggttgtactggtgatctaatggttgatgcaaatattggtgcttgggttggagaactgcctgaattcttcaagggcatcaactgtgacagtcatgatgattatgtcgatattcagagtactggtgctattagccaaggagagcaaccctcattggtgtcaagtcctattaagatgtcttctcatctggaacaaaatgatgacactcaagaaactctgcagaatattgctagttttcaggtatgctcatttcctgcataaaaaatctctttgtatcagatgaagaacttggtatttttggtaaaatgatgtgcctaccaactcaaatgtgtatttgccattaacatagttcatgaagagggttaatcaccataaaagagattgatgacgatggtttggaagtagaactgaacctaaggggtagagggttggcaggctgaggaacttggctagggaggatagactggaacatatggctgagatggacttggtgctaacttatatggtttcgcttttatagggacgacatctaacaatccattcaaacctttcctttaaatataataattctaccccatctgataagatcatatcctatctccaattaaacctaagttgctagctaagcaatgtgttgcagataaatattgtaactgccatctcacaccagccctgatgggcccgtgacctaccttatggccatatgcagttatgcacataacaatatcactgtgtgaggtttttagtctgtctattttatattgcaaatttccccaaaatattcatgctaacaggtttaccacacatctgtttatgatgcactgtcactacacattttcagtacttttaagttaccatgtcatttctttatttggttcctgtttttattgttcaatttcctttcatgcttggtagcaaaatgcacttgttttgccatctttattattctaaaacaattgattgatttaagttttgctgttctttacattaatttcctggttttcttattttcagcagcatatatccaagatctaaagtggatgttctataaactataataccctgtttggcatatattcatttgttctttggacataactcatcagtcatgactcaaaagaaagagactacactttctcttttctatttcgtttaatactatgaccacaatgaaattaatcgtttaccttgagtgttacaagatagcacaataagactgcaaaataataatgttttcgttcttttgaataagttgtttgcagcatctgttaacttttcctgcaagttgggttgcacgaatcacccaatgccattgtcttatacttttgaaactatatgatggtagaagattacacttgactttatgatggaaactattgttctattgttcatttccttgagttaaatagttcagacttacactatatcacccttttttgatacaaacttgcaggtggtcatgtcagaaagaggtaaagtagttggatttcagccaacaaaccgcctagctgtgaatcattgggcaacaaatccattaacgaagctcctgtacgaggggcgaaagatctctccaggtaccatgattgaagtatcaaaccatggaattttattgttaatacctgtgctaaagctgtattttgtctttgcttaatactatggtatggatattgtcagcctttctggagcctaggcttagaatttctcgcccagctaaggttgtcccagttgagttgctgatgtcggtgaatccagaatccttttttgctttggtgaggcctgttcaagatccatgctaatggaggtacttttcatttctcctccagttgttctccatctactaccctcaccctctcttctctctcatgtaattctataatcgccagtactttatttacccagagttctgtagttgctgtcctagttaaagctaatgtcatttgttgtcacccaatctatgcttatcttacccttaaaacaggattttacatgctttgtcattacatggtgctgtacagattcatgaactttttaaacatagtagactgggcagttttcttgttggttagtggatgcattttatagtaaaggatatggaattataaactctctaaatagtagctttactctttgtcttgcatgcgcttgcgaatcaaatagaagaactgcaagtaggtgttgcaagctatggaccatgaatcattgcagcacaggctctcacgttggggttctctatgtggttaaagcatggttgaatcgatccacatgtagaagttatcagttattacttcttaatgactccaatccagatgacacaatggagtccctttgtggaatatcagcaccatgccagattgcaatacagctattcgtgacgatatgctgtctgttctgctcatgttggagtttatcatcggttttctgtttctgaagtctcaggtaattaacctcgaaccttctgggtaaattctttttatcagtagtaacaatggtagctcttcatcatcggtatcaggatgctcattttgagttttttttttggggaagaatttgcctcaagcccattttccagtttctacagaaggctggaagcaatttcattttgcgtaatcaagatatcacctgctagacaactttgcaaactaacatacaccctgtaagagttgtcaagtgtacaattatagatcacagtgaaagtagaatgaatggtaaccacttcagttgacatcataggtcttgggcgtctatgatgtaacactctctttcgcacacagcatattttgtatgaaaaatattatataatcgatctcttctactgaactattgttctatgtgctcgtatgcaccacagtaaattaggatgctaaattgatttgtcgggctgcaaatctgaattcacaatcgtgagctaggcataaatttctccaattgagttcattatcacttcctctgtgataatttggttcattctctccgtgtggtgggcagcatcccagtatatgtacttgctgggatgtgtgcatgctcttcggcctctgcatgtttgcccaacttcaataactcctgttccacaacaacctcttgaggtttctgtcaggcctgtagttcagaagaaaatatttttttgaggttataataccaataagtgcacactttaataaggatgctctgaaatataggacaacttaccatagttattggggcttattgttgccatgccgatggttgtataagtatcaacaaatgtagccctgatatttggttgattctttagaagacgcaccacttcaactagcctctcattaaatgaggttgccagcaagttcatgttttcatggcatctggttgtacctgtgcctagcaatgttctagcaataggtaaacacccaattgggggcactccaacaaagacaaatctccttcctccaagtgctgccatcacctgagtaacatggcaatgattaggtcttgagcaaaagttgatataactcttttctgacaagtgcttacctgggtgtagttagcaacgcgtgatatcagctggttttcgtactgtgggccgctctctgctgctgactggtttgaggcaagatagtgaaaaagcagatctgttgttccagcacttacgacgaatgtagccctcctgactagttcttctgctcttcttcgtccaactaacctctgcaggttccttttgtaacgccaaaggtcctctatttggttgggaaatgacagtgcattctatcatgaaaaaggaaagaaaacctgtcatgacagttcattctaccatgaaaaagaaagaaaacctgtctagtcactacccaatgctggccctcaataatcaaattaacttggactactaagtagtcatgattcacatatcaaactaggttgatcatgcattatctgcttggttatccaattttgactactaaaaaatatttggtagtagcttctaattctgtccctggcagattgatttaatagcttttccttactttctgacggtgaaatatttgtgctttgcaggttatgcttaccgaacttctggcagtggcctcgtcatacccggaacctgctgatgcaaaactcacacccctcctgagctgtcctgacctcaaccttgggtcgcggaatcctggaatactcctcgctatacctagtttttccgctgcataaccacaaagcttatcctcaaatatccctactgaacaatggtgaacaccactactaactcaggtcaccttctaaatcaaagcacatctgctcaactctgaaatacttgtgtaaatggagatgcaaggcaatgggtgtatttgtgtctgtaccgagtatgtccgtgatgagccggccgttgctgaaccggccggtgggcctgccgccgaggaagtcggcgccgtacggcaagaagttggccttcatcgccgtctgcagccggttgttgttgccgggatccaccgtcgagtcaccgaacaccagcatggtggtacacccggtggtggtgtagttgatcaccctcgccggcggtggcggcactgaagaccagcccggctcctgcggcggcaccaccgtccgcggcggcgccggctccctccttggtggcaatggagactgccacggctgctgctgctgctggggcggcgttggtggtgctggctccggcgtgtcaggctcctgtgatggcggggaatccggcagcggcggctccggcgaatcggaataccccggcgacggtggtgacaccgggagcccaggcatgggcgggtcgtcgtattggtcgtccggtggctgtggcggtgacagctgcgccgctgccattgttatcagggagaagtgccatgcgacgaggagcagcgccgccgcagccaccgccagcctcctcatggacttgctgcgttgctttgctcagttcagttatgtgctagcttgtcaaggtccaaagacaagagtgcatgcatgtataaataaatgctcagctaagtaaaactgccgttgcctgtcaaggtggcttggtgccatgtaggtaagggagcgactaagggtgtgtttgaggattggggagattggggagattggggagattgggaagatacgcaaaacgaggtgagccattagcacatgattaattgagtattaactattttaaacttcaaaaatggattaatatgattttttaaagcaactttcctatagaaattttttgcaaaaaacgcaccgtttagtagtttgaaaagcgtgcgcgcggaaaacgagggacaatctccccaaacactcacaaacgaacggtgcctaaatttgcttaagagttcgagcttgctttgtgtgacatgactaaatttagaagacattttcagtgaaatcacccacttgttagtggccagtgggagattaatcgggagagattcttgtaaaaaaaaaaggagatcggaataaccaaagaggcacatactgcaaaattgcaaagaagagcaggtggtggttggttcagtggtttgtgtgatctttgcgtctgccatgcaaattcgctcttctagaacaatcttctttttttcttttttttccagcgaaaaaggtactgtgattttgtatttcctccttctatagtcaacaacagatgtcaaaatatgcatattcttcctccggtaaaagaaatacagcgtttcaacatttttcagttcgatcttttaaaattttgatcatcaataatttttgaaatgcttattttgaaaatataaaaatggtcaatgtagatttgttatgaaaaaaaatactttcgtaatctcataaaaatgatacatgtgtagattttataagtacctagccatgaaattgattttcttccttcacaaggtagaaccgaaggtaaatactgaaaataatagcaggagagttttcttttaataacaattctcaccatcatggcatcgtctgcttcaaaactagtactcgcaaatccatattcctctagaaacaagtaaacaaatagacatgtcacaccaatacacccaattgtttactcataagggattactcgcaaattactcgcaagaaaattccatttattatgccaaaggacatgagtgtcaaaattttgacattaattaaacaaaaaatgcaaacatttattatgccaaaggacatgagtgacaaaattttgacataaatgcaagagcctcagctagacaaaattgtcatttacaaaagagagtcctacatttattctacgacaaaattcaaaggaaaaaaaaactcttctaaatgtctatcctatcctaaccttggaaatgactgaaaaacaaaaaacccaacttcttcacgttggaatccggtctgcccacctataggcctgtagggatataaaccttcaaaaaataattgaattcttcatacctctaaattctaatatgataatttttgtatactgtatgatcttttggtatcatgtcatgcactctaaaacctaagaaagatgatctaaataaataaataaataatgaggatcaatttccctcatgcttcggctgcttattgtcattagagctggtgccctgctccaatgaggccttcacaaatctgcctctgacacgccttcgcgtgtctgctgttgccttgcgggaggcgtacattatctgcttgacaaacctgaaaaattcaaaagtgtaccagcaacttgtaattgcaatcttgtttcaaaaagctcgtactgaacaaaatattattcctaggcaactaaataatatttcagatgcacatttgagaattttaactgttctttctgaagactaatctgcaatgtaagctacaaagtgagacgaaaaatgcgtattgatacgtacctcctgttgctctttttctccttgtatctctgcacagctcgctgtctcttctccggatcagggcaagatttctcgggcagcacgatatgcgaggtctgttgatcttggccgtcaaacatgtttgagctcccacccagcagcgagcccgtgttggagctctgaaaattcacacagggaaactctgaacctgtgttgttgttgctactgtttgtgtctatcaccggtaactgatcatatgccgtttcgtcgtttatgttcagtggttgcagaagactatgatctgaagattgcggtatgagctgtgcgagttctgaagatgaagttgctgctcctatctcgttgttgatgttcgcgtccatcatcggtaactgaacataaggtgcgttgctcatgttcagaggctgcagaaagctagtatctgataacagtgcgatgtctgaacacgatgaggatgccatttgctgatgatcagggtccagataggatcccaaatcgaaataagaaggatccaaatccagataagaaggttcctgcgatcaattgaagaaaacaagtttgtgaggcggcatcaaactgtacgataattttgatgaatttgaaagggggtgaaataagcagaaccatcgtttacttgcaatgctcctggttccattagtgcgactgaatcaaacgagtttgtccaggcttgaaagtaatcttgctgatttgcattgtcaacaagtaaatcttctccacctattgtcgccatctctttactaatgtcaggattcgcatcttcaaacatctcaaatgagacatgtgtgtatatatatattagtatgcttatgttaattgaatgatggtaataagatgatatgttagtcatataatggaatgctatatattaatgggattgatcaagggatgaattaggtaaggaaaagaaatgcaactcacttttgtttaagaaggcagatcacttagagatttaagagtttaccattggcttcttttaataccagatcacttatttttaataccagatcacttagagatttaaggaaagaatgagtttaccattggcttcttttaatacctcgggataataacaataatttgtatagctcatactattgtcgtatgggacgaatgggagtgtgtcggtgatccacggctcatccgtcgccgccgccgccggcggcggcggcggtgccggcacgtcgatagagaagatgcgggccatctcggcggggccggggataccggtgtaggcggcggcggggcggtggcagtggcgcgaggcgtcgcgcgcgcacgaggcgcagaacgcctcggcgtggtggtcggagcgcgccacggcgggcgcggcgtggcacgcgtcgcagagcggggcgcgccggtgcgcgcgcgcggccgcggcgtggtgggcggcgaggtcgcagaccaggcagaggcgcgcgccgccgtgctgggcgcagtgcacgacggcgcgctcgccgcggcacgagtcgcatgacgggacgacggcgacaccaccaccaccaccatcatcgccggcgtccatcacgacgtgtatcgtgacgacgacgacgacgatgacgacgtacgttgtcagtagcacacgcatctaggcggcggcggccggtgcgcgccgcggtggcggccaccggcggcgatcgaggtgagcgtaacgtggcggacgagggtggccgcagggatcgttggatgggggatcgatggacctatttatagccctcgatggatttagtgtgttaaatatagtacggagtagttagcaacagaactaacagaccgacgtacggatcggttcatcatatccaccgactcaaacacgtcacagtggacgccgatacttcgtttcgtggtacgtacgtttagacacgatcagtttcgttcccaattataggaaaggttttcctttaaaaaaaaattagtataggagagcacgtaccatgccgtcttttaaggttcagttttattttatttttctgataaataatccctctatacaattatcaataaaatcaggtcatatctttgttcgttgaaaagatatctcctgactttgtgtagtttacagttataccacggaccccactttactatagtccacatgttacgcgctggaaagcgatctcctgattttgtgtagtttacagttataccaccaacctcacctacatgttactgcaagtcggccggtctcttcattcgtctccgttcggtttttggttttgtcgccgtttttcttttcaatccttttttttttttgcacgtggaagggtttttatgggtggacccgctttactcccgttttttttaccatccggtagttctttcgtcgctggtttttccttcgatctccagccgccgtggagccgaaccttactgcaacttcgatttgcctctcgatgtttcttcctccaattaattaaaaaatcgattatccactcatttctcattattttctccatgattttgtctttcaattcgacttaaatttggaaaattatatccctatttaaccgttagtggccgtctttttcccgagttttttcaattcggctttaaatcttccctgatttccccttttaattcgggaaattcaattcctatctagagcaagtacaatagcaggttacaagtcaactataagcacatatatgaagtagaagagaggagagtcacggctttaattcggggaattcaattcctatttagagcaagtacaatagcagaatacaagtcaacaagtaaactataacaccatatgaaagagagaggagagagaaagcgtgctacagattggtagcgagctactacacggattccaaaagttatatgtgtataagaggtgagactatatattaataatatagtaagcaactattgtatgagttgactattaaattggttataaatgatttggatttagtagttagctatactattaaacttttgctcttataagtaactatttgatagaatgagctattagattgactatagatgatttggagccagtggttggctatactattaaacttcctctcaaccatttggagccggtggttagctatactattaaaacttgggagaatttgaaccatgccacacaaaattttgtaaaatttgtgatatgccaccctgacccacatgtcattgactcatgtgggtcctacatgtcattgagatacgggtggcatatctcaaattttgcaaatataggttggcatggttccaacaaacccaatccgtggtagatgatgtccggcaagcgagcttcctggccatctttattcccgagttttacatattttgattttggaaaaaaaaagggaaagagatgattgagtggatcaaaagccctaaaccaattttaaattttaataaataaagaaagatcagaggtgattgagtggataaaaaccctcaaccaatttaaaaagatcaagaatgatccaattttaaaacatctttgccgaatttgatgggaatgatggcatcggcatcggcatcttatggacagtatgtgcgagctgagccggcttctctcgtggactggccgtaaagagactgaaaatcgtggactgggccgtaaagagactgaaaaggaagaaaagattgggctttagtccaaaccgggactgaaaatgaagaatttattagctttcagtaaaaaaaatatttttcaatttatttctcacctcccaacaactatatattctatttctgaaaaaatatctttacttattacaacgactgacatttttcatagcattagagaaaaaaaaccatgcatgattatgtgttgcaaatgctccttactcccgtagcacggatgaatgatttacgggattcagttttatctaatttttctcattttatctgatttttgtatcgagttcttgtttatcgtaagaggatttagtatgaataatttcacattataataggtgtgaaataaattctctaaatcaccctgagattaactgaacaaaatcacccctggtgtgaaattaccctcaattattttttgtgtgagagattaaccgagcaaaatcaccccaatccttttgtgtgagagattaaccgaactaaaatcacccctcgtgtgatagattaaccgaacaatgcaaaatagaaaaatatccccaaccatatatactccctctatttcaaaatgtttgacaccgttgactttttaacacatgatcgttcgtcttattaaaaaaatttgtgaaatatgtaaaactatatgtatacatcaaagtatatttaacaataaatcaaatgatataaaaagaataaataattacttaaattttttgaataagacgaatggtcaaatatgtacttaaaaaatcaacggtgtcaaacattttgaaatggaaatggagggagtatggattaagaaagacacgttaaggatacaaggaaccctaacaaacattgtgtctcaaaacggcagcaaccaatcgtagacgcgatgatggcccacgtaatctgatttggttatacaaacgtgttgccacactgtggcagcctcctcctccgtgtacttgtgaacgctccagctaattttgtcatacacgcctagcacactagagtcagtgtcataacgcaagctaccacacgtagctgataagtccgatcgtcgccgcgcgccgcgccatggtgccgtcgttcccgcagccggccagtgcggcggcggcgacgcggccaataccggggagctacggcccgccgctgctcggcccgctccgcgaccgcctcgactacttctggttccagggccccgacgacttcttccgccgccgcgccgccgaccacaagagcaccgtgttccgcgccaacatcccgcccaccttccccttcttcctcggcgtcgacccgcgcgtcgtcgccgtcgttgatgccgccgccttcaccgcgctcttcgacccggccctcgtcgacaagcgcgacgtcctcatcggcccctacgtccccagcctcgccttcacccgcggcacccgcgtcggcgtctacctcgacacccaggaccccgaccacgcccgcaccaaggccttctccatcgacctcctccgccgcgccgcccgcaactgggccgccgagctccgcgccgccgtcgacgacatgctcgccgccgtcgaggaagacctcaacagggcccctgaccccgccgccgcctccgccagctacctcatcccgctccagaagtgcatcttccgcttcctctgcaaggcgctcgtcggcgccgacccggcggcggacggcctcgtcgaccgcttcggcgtgtacatcctcgacgtgtggctggcgttgcagctggtgccgacgcagaaggtgggcgtcatcccgcagccgctggaggagctcctgctccactccttcccgctgccgtcgttcgtcgtcaagcccgggtacgacctcctctaccgcttcgtggagaagcacggcgccgccgccgtgtccatcgctgagaaggagcacggcatcagcaaggaggaggccatcaacaacatcctcttcgtgctcggcttcaacgcgttcggcggcttctcggtgttcctgccgttcctggtcatggaggtcggcaagcccggccgggacgacctgcggcggcggctgcgggaggaggtgcgccgcgtgctgggcggcggcgacggcggcgaggccgggttcgcggcggtgagggagatggcgctggtgcggtcgacggtgtacgaggtgctccggatgcagccgccggtgccgctgcagttcgggcgggcgcggcgagacttcgtgctgcggtcgcacggcggcgcggcgtacgaggtgggcaagggcgagctgctgtgcgggtaccagccgctggccatgcgcgacccggcggtgttcgaccggccggaggagttcgtgccggagaggttcctcggcgacgacggcgaggcgctgctgcagtacgtgtactggtccaacgggccggagaccggcgagccgtcgccggggaacaaacagtgtgccgccaaggaggtggtcgtcgccaccgcgtgcatgctcgtcgccgagcttttccggcggtacgacgacttcgaatgcgacggcacctccttcaccaagctcgacaagcgggagctcactcccagctaagctttgctgccgccattctctcactcgatctccatgcacatatgcatgaagaaattaattaaattcaagttgctagctccattttttctctttgagctgctgataaaaaaaacatctctattcttctgtgcaataagccaataattaagcattaatcagagcgtacaagtaaaaattgttttcactgttttatgtggatatatatatgtacagggatccaccaaaattaatttgatactacgtagtacgacatttgtttagggatcaacgattcacgtttcacttttttttacagcgtcaacatatataaacacatagatatgagagtatttaatatacttattactgacatactcgcttcgtcccataaaaaaaaaccaaatcctatgtatgaatggagtattctagtagtacagtagtgtaaaaaaccgccaatagattgatcctgaatttcaggtcaaggagacaaagcaactactccatagaatcatagtattaggatatgtttcatccagtaaaaaaatatatttgaagatggggagtaagaaacacgaaacggaaaaacgagtgaagaagagaagacatttcagggtctgcttgtttctgatgccaaaagcatttttttagataatgccaaatgcgtggacagaatgcttgttctaataccaaatgcatggacagaatggttgataggtatctgcttgtatcttgctcgatggaaaccgcatggacagcgacgcatttcttctccttttgcatgttactactgaacggttgacacaggatatattactggcgaaaaagtacatgttaacatgggttcaaacagtaacacgcatttcaatcaagtgtgcaagtgcaaacacaaaatgatcgtctgtaaccgtagcgcgtaaacaacaagacgtacagttatactacctccattccaaaattttgacgccgttgacttttttaaaaatgtttgtccgttcgtcttattcaaaaaatttaagtaattgttaattctttttctatcatttgatttattgttaaatatacttttatgtatacgtatagttttacacattttacaaatttttttaaataagacgaacggttaaatatatttaaaaaaagttaacggcgtcaaacatttagggaaggagggagtatatgccaaacatatccctgtatggctatattgattggcaacaaatacagtactattgatcccgtgttgtgccaaccacaacagcgacaagtatcctgtcaatttgtggtgctaacaacttgccattgataagtccagattaactagaatagacgcaccaaggcacatacatgtaaatgctagctcctggataggcaaaattgatccaaagaccagctaaactgccaaatcgttgggaaagtttacataaatgtgtctcccttgcaggtaaacaaaaacatatagtgagctgaagaaggctagttcttcgtgcaagagatcagctgtgcaatcctcataaaagggatcggctgatcatagctgatgaagaaaatgaatttgttgatttcatgaataacagtggcactaaaaggcattctgaatataaatgaaaaatacagtgttagaaagacaccaaaaacaaacaaacaaagacttgcaaggaaaacagtacaagacaaacagtcaccatagttctacttctttcacatgtgaaacatggctaggaaaggaaaatgaaaacctagacatgtaggaattgagtatacgagaattgccatggtttgtaatttgtactctgtagtttgtaccataggcattgcatttattcatttactatggcaagagaagaacagagaaccaagagcagttcaagaatagatagcagtctgttagaggagcgagttcaatgcagaagagaagttataatcaattggtatggaaacaatggatgtatcaaatggcatcggaaaatgtcgttgctgcactcacatatctagctacaaaaaggacagatggcttgaaggaggagctagctacgtacatcatgatggtattattccaaatacaatctgaaacaggtttgtagcctgagtttaaatgataaaaaaaggagtaactgaatataattttaaatggttggtttgccaagtcagtaagctatacaagcacagcaatgtacaaggttatgaatatattaccaacaataatctgtctcaatgcagaaaacatgtcgaaataacaaagcacgaatgaacagagcaacgtctgtcatacaaaaaactaaaatttcttgtgtggtcttagcagagccacttatagccaacccaagtacagcgaaacgtagtcatggcagcttaatttctcaatgaaattcataacaagcacatgttcattgattattaattaaacatgttttcttttgctaaggcaggtaaatgtacctgcccatgtttgcctctatattggaattaatttgtttgttttctttccatataaaaaagtgctgggaagcttctattgcatttgtatacacttcttatatattctgtaaattagttaacttattattattattattatctcttacttatggaagaaaagtaattaaccaatgttgcgtgtcctcacaaggatgtgtttgttctagttctcgtaaaaagaaaagaaaagaaaaggaaaggaaagagaggaggtgggtttggcccaactagaaaggcatctcgtacgtaagcccacttagcccaactagagaacgttgtaggggttgcgggaatcaacagccgccgggagaggttaattagggttccaaacttgcatggagcgagagatcgagatgagcgagatggagacgggtaaggcgatcgagttggtgttgaagcggttggatgaggtgcgtacgcgcatggatggggtggagaagctgttgcgtatactcatctgcagggaggagaagcgagcgaaggttgggaggaggaggaggaggtcgacaagatgcagatggtgacggcggcggcaggtggcggtagcagcagcaggaggaggaaagccatcaagagaaactttaaggctaaagaagcagaccgcaaggagacggaagaggagggcaatcaggtgaagaagatcaccagccagcagctgtaagtgtatttaagtactccctccatattttaatgtaggatgccgttgactttttaacaccactcgtcttatttaaaaattatatgtaaatataaaaatacttatgtcaaaaattttatgcaaatataaaaatacttatgtcatgcttaaagaatatttgatgataaattaagtcgcaataaaataaattataattacataatttttttaataagacgaaaggttaaacgtttgtaaaaaaatcaacagcgtcatacattaaaatacggatacggatagagttttatctgtaccgatggatgatccgatccagctattatccatcatccattctgagtttattggtaatgatgatactactgatatggtcaatttaaccctaactagttagtataccaatgttactatgtgatatatctgggcctcccaaaaggaagaggaagaggaagaaggaagaagacgccagcgagaagaagaagaagaagaagcggcagacggaggaagcagaagcggagaagaagattgaggcgaggaaagccaaaaaagaggcgtacgagcggtacctggcgaatttctttgattttgagcccttcccacgcacacccgaccacatcctcaacgagatgcccgaggaagagcgtgccggagaaaatcaacttgctgccttcgctgatagtattatggaacgtcgcaggctcctataccagagatgcatcaaggactacatggacaaggacaaggacgatcacgaatagcaagtgtcttcgtctgtctgtgatcaaagctactactactggagtatcctattctgagttggactgtatcgtatcgtctcacttcattatataataatgactatgtcatgatcgatgtaatcggcactgagatatattaatattaactactccctccgtttcaaaatgtttgacaccgttgactttttagcacatgtttggccgttcgtcttattcaaaaaatttaagtaattattaattcttttcctatcatttgattcattattaaatatatttttatgtaggcatataattttacatatttaacaaaagcttttgaataagacgaacggtcaaacatgtgcctaaaaagtcacggtgtcaaatatttcgaaacagaggagtatatattagtactaatatcagattcttctactgctgacttcctgaatgagacgaacattcgatgcaaaattagagaatggttggtagtacgactgagatagtcagatagatgatcacgttgggtgtgtgtgtttgtcttggagggctgaaaacgacagttaagcttagacctgctggccgccagctagactccattgtttcgcttatttgcaaacagaaaataatttgcaaataaaacttttatatatgtgttcttagtgataaaatgcaaaggctgaaaaaactacgattaaaaaaaacctcaaaatcaacttaaggttgttcaattttggtttataagcatacgcataagtcaaaagatgaggctgttagtgttaatttcccagtggccaacaaactgtttttgatcagtgaagaaattaattcaaatgaatgaatgacggagtattggagcttgcacacttaagtatcttagttacataaatgtacgagcatctccctcacagctaaacaaaaacaacgcaaggctagtccttcagttctcatgcaggaaatcagctacgtaatcctcgtagaaaggatcgagtttgaaccaacgtaatccttataaccaacgtaatcataactaagaacagtggcactaaatgaccacactctgaatataaatgaaaaaaaaaagcaccaaaaaagatcaagaagaagaagctgctgctttcaaggaaaacaatacacgacaaatagtcaccatagttctttcacatgttaggaaaaaagaaaatgaaaacccaaacatgtaggaattgagtatacggattgccatggtttgtaatttgtattatgtaccatagacattacatttactatagccagagaacagagaagcaagagcagttaaggaatagagaaactatcaatgggtaattcctacatgtttttatattagaggagcgagttctatgcagaagagaaactatcaatgggtaattcggtattggaaacaaacatgtataaattgacatcgaaaaagctacaaagaggacagatggctttaagaaggagctacaagatgcattccagccaaacttgaaacaagtttatcacctgagtttaaatgacaaaaaagcagtaactgttcctcgagttgaatgttcacaccaaaagttggttgactggatcacggcaaatgatggatatgaaaaaaaaaaaaaagggtgcagaaataccatcaaaatgacttatctttaccatggaacctggaggcaggtcgagctaaaaaacatacatatctaacaaaaatagtacaacagatacacatcatgtaactgaataaaattttaaatggtcagtttgccaagtcagtaagctatacaggcacagcaaagtacaaggttgtgaatatattaccatcaacaatctgtctcaattcagagaacatgtcgaaataacaaagcacgaatgaacagagcaacatttgtcatacaaaaactgaaatttcttgtgtggtcttagcagagccacttataaccaacccaagtacaggaaattgtagtcatggcagctcaatttctcaatgaaattcatagcaagtacatcttcattgattattaaacatgttttcttttgctaaggcatggtacataactaaatgtggggtttctaaaaaaagaaaaggtaaatgtacctgcccatgttgtctcccaggctaaaaaagaccacttggccaatagctcagcaagcaaaaacaaaagaaataaaacactgctcttcaattcaaaaggaagatagtactatcttctcatgaatggataaaccgctacgcacccatggcaacccgtttgcccctcttggatgttgatgatgcattctctgccaatatcctagacaaaatgtctgcttgctttgagtaccctccagcttttaagctgtccatcagggcatcgcaacccttttgatccacgacacctcctttgttcttgatcttgcaaagcatggagtatgcaggcaatgtcttctcctcagtgtacagggcctccaagactctgtcataggttgagaagctgacatcaaagtccctgtccaatgcaaaatcagccaacttatgtgcctccatcactttgtcattctcgcagagggcaatcagcaacttatctagatcaggcaagcatccattttccaccatcagattgacacggccgattgcttcctccacatggcccctcatgaagagagcttccagaatcttatgagccatgtccatgttctctgtaacccccttctcaatcatactcttcataaccctgctagcagtctgaacccggccactgttgaaaagcgctaccatgacagacatgaacagggatgggctcggtacatgcccttgttccatcatactgtcaagtgccgtctttgcatcagctggctcattcttcttcaggaagctatcaacaagcagtgcatgcgattcagggtcagtacggacaccacggcgtgtcataatggcaagaatctcctgtgctgcttctggcacaccttcctttgcatgcccacggataagactgttaaaagcagccttgtcatcaacgcctttcttcatcagctgcctgaagaaagtctcagccttgctggtgttcccattgctgcacaaatactcaatcactggattataagctggcccttcaagcacagggctctttgggctcaacagtgtccccttctcaagaagctcatccatcacctcaacagcaccatcacactttccacccgcgcacaagctctccatcagcaccccatactgtcttggatccacaagaacatgcttgaactgcccactcttctggtgcacatccaacgcaccatccaagtcacccgctcggcatagcgtcgtcacaagcctcaaaaacactgacttgtcctttggagtgagccgccgctccgccatgtcatccattgccttccgggcctccacaacccttccctcatcatcacagagccctggcatcagagcagcaaacgtcttctcgctcaacctcaaccccttctcccccatttccgagaacagccccactgcctcctccaccttacctgcttcaacatatcccttgatcatgacattgtacgacaccgagttttgtgcaaaaccagctcctggcatttcgtcaaacactttgcgggcactctccagatcacccgcccgaacccaagcattgagaagagtgttgtacgtcgtcacatccggtgtcaccccgtgatccttcatgtccccgaacaccctcaaggctgcctccatcttcttgcacaggccgaacccccagatcaatgtgttgtaggtggacaggtcaggggtgacggcgtcggcgatcatggcgttgtagatccgcctggccatggcctctcggccgcggcagaggatggccttgaggacggcgttgtaggagagcgcggtgcgggcgatgccgaggtcgggcatcaagcggaagagcttaacggattcctgcgggatgttggccttgccgtaggcggcgatgagggcggcgacggtggcctcctcgggggcgatggagaaggagggcatggtgtcgaggaggatgcagcgggcgtggttgagcatgcggtgggaggcgaggatcgggatgaggagggagaaggtggctggctcggggctgaagccggcgcgacggtaggcgaagcggaagaactggagggcgaggtcggcgcggccggcggcggcggccccggagatgacgccgtggacgagcggcgcggcgagcgtcggggagagcaggcggatggagttctcgaggcgggtggtccacgggcggcggcggatcatgtagaggatggtctcgtggaggggctcctcgcggcggggcgggttgggggtcgccgccgccgcctccgccggcgtcacctccggcacagcctcggcctcggcctcggtctccgggggaggtggttccggcgtgtcgagggtggagaaggcatggcggaagagaggcgcggaggggttgttgcgggagaggaggcggagggggaggtggaggtggtggcggcgcgacatggctgcggcggcgtggaggagtggagctcggggagaagagtcgagggtttaggaggaggaggaagaggctcgacaccacccacgctaaagagcgtgatgggcccatatttaattgggccattaagtgacttgtggttctgggccttttagaacccagcccaacacggcagtgtagaaacaagggattcatacgggccgggctcaacagtcaatacgcatgcaaaagatcgtgatgggcctatttttcattgggccgcgcgtcatgataatttgctttgttgttctattattgaaaaagtacacccaaggtctctcaatttgtcatcgaattataaaatcatccctcaactgtaaaaccggatacaacgcatccggtttgggtctccgctcggtcggctacgttgctatcatcacattcttgtagccaagctggaatcagcatcacattatgtaactagtatacagctaaacagtttaaactggtaaaagaaaaatctaggcctcttttgaaagacaggattgcacctaggagaagatgcctaagtttctagtgtgcgatcgattcgaccaacggtgtacttgtagaatgccaccaactccacggcagcaaatgtagagagcacacatagcaagaagatattgagttttcttgcatagtaatacttgcacctgcaggtcaaatcaaatcggatacatcaaataataattaattagagattgtgtaagttaattcgtgaagagttaactaattaattaccagaggaggtcatctgggttgggcttgacgtggccgatgagtttgcagaggagctctgcatcaatctgtgcctccttgctacgtttcttgtattgccaattcaacgtagcaagcttgtagaacagctcttccttcttctgcttgacctccagcttaagggcctccacctcagctgtctcaagagcattcggaggaggctctacatgacaccgccatgaatgctgtcgttgcacacacaaattaattagtaattagtagtacttgaatgaaattaagcttgtttatgagcatggaattacctatccacttgtttcttgtgggcacagatgtgcttgtcttgatgcaaatgattatgcaccaaataataagattgaaattgacagaacaactaaagtctgtaataatttagacgaggagggtatttgaatgtaataattttcagatgagaaaattaagtaggggaagcatgcaatcgagggggatttggacgatgcgaacctttggtgttgatggtgggtgatcggcagcagcatcggagctcatcaaccgccgaaaagtagttccatacgaggacgacgacgacgacacaggcgagccgccgccgccgccgccgtagataaggccttgcaacagccgccgccgctgcccctccgcctcagcagccaccaccggtgagccgcctccaatattcatcgaagcgcggcgtccaccaccgccggcgatcttcctcgccgcaagccgaagcgccgccatcgccgccgccagcttagctagctctccctacgtacgtatatggtataaagacttctccttataaatataccagtaggtatcggtatcgtattagtcaccgcttactcaaattttagattccaaagctatatatactccaaataaatatgaatttggtaaaattcgtcaatttggattctcaatagcgtttagtatggatttgatttttttcgttaatttgtctgtctgtacagcagcagcagcattacattacatgcatgcaactaatttggtagcctatctagctaattgaagaagatggccggctccagccgtggctccgtcaagtccaccaccgtctcctcctccatctccggcgatcgccaactctctccgacgctgcacttcacggctaacctagtgctgtgcatcgtgtcgccggcgctgctgcttctcccgatgcgggtgaccaaggtggcggcggcggcgtgcttgcgggaggaaggagcgatggtggcgaggatctggacgacctcgctcatggtgggacgcgactcgggctcccactgcaggcactcccgcgccaggtgcgccatgatctgcatctcctcctgcgggaaccgcccctgcagcgccgggtccggcagctccgccaccaccagccggctgtcgcgcagccgcggcgccgcccacaggaccaggctctcccccgccgccgccggcgggcggtggtggtggatcggctgccgccccgtgatgagctccaggatgaccacgccgaagctgaacacgtccgacttgagcgacgccttccccacgatggcgtactccggcgcgaagtacccgaacgtgcccagcatccgcgccggcgagctcgagcagctcgtcacgccgtcgttcatcaggcacttggccatgccaaggtcggtgatcttcgccctgaacttgtcgtcgagcaggatgttggtggacttgatgtcgcggtggaggatccgcggcgccgccgcctcgtgcaggtactccacccccctcgccgcgccgagcgccacgccgacgcgcgtcgcccagtccatggccttcctcccctgcttgaggtcgaggcagtcgcgcaggttgccattgcccatgcactcgaacaccagcagccgctccagctgccggccctggctctccatgcagtaacccagcaatggcacgacatggcagtggttcagccgagacagcagctcaacctgttcgaccaaatgcaaatcgaacttcagattgccgccactgcaaatgcaagcaaattggatgttcttgggatttgtcaatgagatggtactacctcggataggaactcgaagtcttcgtctgcgcctccgaggggcctgagcttcttcacggcaatgaccttggcgtcgctaagctgtccacggtacaccttgcttgttcctccaactccgatcagatgttcatctgaaaatttcccggttgcttgctccaattccgagtaggagaacctgacgatgacaccgggaagcggaccaccttcattgccacatattggattgcagctgcacagaaactctgcgacagagaattgaaaaacaagcaaggatcagtgtgctgctctgagtctgaatacactgtcctgaatcaaacaggctctgaatattggagcagattcagacaggcacaacatctaagaaagaaaattcagagatacatgctttgccttgacttacctttaagtacactgatccttggttttggctttggttggggaagaggagaagatcgatgactgacgaggtttgatctgctgctccagctggtgtacttatcaaaggagtatgcatgcgaatgtggagagagcgcatccttgcgacgcaggtagtacgccgtggtgccaaggaatgcaatagtggtgaggatcacacatactagcagtgtaactatcactgttttgttagagacgtgcttctttccttcctgagaaattcctggacagcatatgcacataaacattcagacattcagtaagcacagagttcatctgaacactcagtccacaatataatttatgtatctgaattgtaataccggatgtgcagttacaggaagtgaagcagcccctatcatgtactgcagtgtgttcttttttaagggctttgtcagaagcacatgtgcagttccatgatcctgtgccaccatcatcatctgctgcagagatatccgactaaggcgcaatgcaattgtggactgttcatagagtacatgatcaattgttcataccttgtagacaatggcaggaagaagaacaattcgacgacaagctgctatttgagtttggttcacctagtggatgagctgtgcatacacatgtccagcttgttgttccaactccctctgcagtgccatctgtgcaataacaagtgtacacatcttatatctcataactaccccttccagttcataagcatcagcatgcaacaaattaaaaagataaataaattttgttccatgagaaagtggtgcttaccactcgatgctacttggatcagaagtacacagctgagggaggccaggagaagtttcttgtgtacatccatcagctggagaatggggaaaaaccatcagattgaacccatctgattgctatgctctgaaaaatgacaaaggcatgtttgaatacatcatttgtttgactgaaatcgaagacaaaattgcctcgatacatgcaaagcactaagaacaattccagatgcatattaatattgttagatggtacatggttgactggctattactatcaaattataccactacacatccagaggaacatataaaacacaaaagaattaatatgaacaaaaataaggtttacttcttataaagtaatgcattactagacagaggtgcaaaccattattaccaattaaaaatacctattaaatgccaagctatgattaacaagtagcaacttgaaggaaaatggaggcctcagaggtttacttacaactgacttgacttgttaacgctaatcaaatccagacgaagcgtacgacacagacatgatctctctaaaggttcacaagaaaggctgtgtttagtttacaccaaaattggaagtttggttgaaattggaatgatgtgacggaaaagttagaagtttgtgtgtgtagataagttttgatgtgacggaaaatttggaagtttgaagaaaaactttggaactaaacacggccaaagaaaccagccaaatgtacaagaaaggactaatttgagtttcttcaaactgtgtcctggtccaggagtagaacacgagagagcaaacagggaaggcagggagagagcgagagatgaagttctaacttgagagttcagactaaagtctggactaacaaagaaggctgcttatatgcaggcaaggcattccaagaaagagacagaatctatcaacaatagtttttcaaatgtgtgcttccaaaaaaatggaatttttcaatcatagcattattataacacattcactgcagcaccttccaagacaggagacatctcaacctacagcaccactatgcacagtaggaaaaagaagtaacaggcctggaacgagcaaaacagcagccatctttttccatgctacaaagactcgagattgcctgaacttaggtgtggtgtttgaatagagagattcatttcaaactatggattaaaacttgaaatgacatctgacctaagatctcgaatgtgatggagggcaagtctggcggtgatcggtgatcaggagcctgaaagccacctgggcaaagaagattgttgggcattcagcacaaaaaacacaaagccataggtttctgtcggccaaggacaacgtggagacttcttgaagagattaattgttcattcaaagtgtttcttaatctgatggttacatcttaactctacctgcactcttatggatgtgtcttctgcaactaccactagagtctgatgcttaaaatatgttttcatcttggaagtgcgtaggagctagcttccatttcctagttctcttggttgcgtgattcatccaaataatcattagaaggctaaattggttgcaagatacacatcgatagcattatacctaggcatataataatatctatcatggacaaaataaaattattcggttggtaacttgactaactaccaatagtggcaagaataggattaaatactacaaggaaagaattgggaagtaataatataatatgctcattttttcccttttgagagacattttttcaagcagcatgaagacctgttcttcagatgccacaaaccagttacttttttcttgacaccgacactaaattaacaaacttaaatttgcttctaattgattacattttctcttaattgcagcagtgacagttaagctcggtaggcaaagatccaacaatatggtaagtactaattaatccgtaacaccattgtgtttaaggtcattgaccaaatcaacatggttagctactagcctaccacgtatcctttaaccggacacagctccttagaggggcgtgggtccctgacaggtgggagccagggccaccatcatgggcccacaggtcagtggcgcacgtccctctgacgtagcctcacccccaacctttcagaattagtatatccataacacatgcaggtcgcttgctagtatctctttcctaagatcgcatcaaatcctgtgttaaattggaggaaaacatcatcttgctttcattggagtaactgctggtatagtagtactccattagagcaggtacaatagcagttataaacatattttaatgagataaaagataagagagaagagcggactacatatctgtagccagctgcagcacggactacaagacgcagtatgacaggtaaacaactattatatgaattgactattagattggctatagataaattgaagctagtagtgggctatactattaaacttgctcttagagtatactggtattagctagagctagcttggtcatggcagaattgcatcgcagagtgagaattcttcgatccagaaccactgaattcatcctaaaatacagtaaaaaaactagtactactgctatcttggatggggtaaaaaacatgtattcacctgagagtctgtgagactgtgaccacattggagacctaagggcaagttttatagtagatgtgactaccacatccaatttcatgcattacatagataattaaattaagaggtgatatgtataataggttacctctaccacacaatccccaatatctctagtactctcacatgtttattgaagtttgtgtaggggctgccccttgcatgagaggtgactatttctctctcatccttcttctctcctccacctcactatttagtcctatgtgacatcttggagcttatacttggatgtccatagtacttaccctaaattacccttctgtattctaactaatcttcttccttttctttatatgctggcacagtgccatttccactaaagaatggatcacagttcaacacttcaactctctaggtgaaaaaaaaaagttaccgcctttcctcgaagaaattaaactacttcacccttcaggacgaatgattcttcgacgaggaagaggcgaaggtagatcggcagcaggcagtggacggcatcattctgtcagggaggaacagaagaaacaaaaagggagagagagagagagagagagagagagagagtgagggaaaaggcatcccaatgttggttagtcttaatccaaccctcggttgagcagataaggagtcatctgatccgtccatttttaggaatctgtaagcgaaggttgaaccttgaaacacagcatgattggagaagacgggcggtttggaatttctcaaagtgaaattcgaactcttctttttaaaaaagatgtgacatatcgaactcgaagcaaaatactgtgcaatttcctcgatgatgaggcaaggtcagcggagtgggttctagaattggcggctaccagatggatcagggttgagaagtagaagaagaagggaagagagcggtatgcagcttgccttgtctgaagaacaaattcaaggacacaactcactagaactgttgtattgatttgctgcaagaacctgcatgttttgagtttctgcagggaattctggaggttcaattcctacaatgctgaaactcctcaagattcagttcaaatccaaagtggggaagaagcaaagcgattcaagaagagccgcaatgtgggtgttaaataaacaccaagatgagaaaaaaatttgaagaacagaagcagaaaccgaaattcaggccaaaaatcatcatcaacacagtgggaactctttccggcaagagaaagatttatgcgcattgactaatactagagattaacagggaaggggggagacgatggtagggacctaacctcagacgctgctggttccatggtgatggagctccatctccaaaaaggtccaaagtggagagcctctctctgttaaattgggagtttggagtgagcagagcagaggcaaggcaaagcaggtgcagccttgaatgcactgtggactcactctgcctgctgggaggggaggacaagttaatgtgacatgccttacattaagagagaattattactagtgtgggagagagtatgaggcaatgggggaaacaaagtcagccgctcctccgcccttaattttgtctgaattccagttcactccatttgcatttgcagcgcactacgtacaacgcctcgcctcacggctcacgcacgacaccgcctccgaatcaaacctcaatccatccatggcgccgcatgtgcctcaccagtcaccacctcatcatccacgtacccgtcactcgcatcgcacgtctcatccaaacgaaaccgcgcccagtccaagtgaagaagagaaacacgaactgccaagtcctatagacttgtactactactactctctctttgaaacagtcaggcagccatggtgtgtctctcttttctgtgtttagcagtggcaagccatctcgttcagggcttcttgtgatcatagggcaaatccccttgccttccttcaagaaaaagaggacattcctcctttcagtctcaacaactcaacaaggtgggggaaaaaagaaagaatgaaaaaaaatgaaagcactagcagaggcctcagtttccaagttccaacatccacaagtcttcaaaaatcaaaataaacgtcgtaacatgcaccagcatgtgccactaagattaagcaatatacaaaatgcacccacatttccaactaaaaaaacactcacatttctgtaacaacagggttgacagactggatccaatgctacaacaggtcaactcattgacagtaaagccccttactgtcaatgagatagcagagacaatacccacatgtcagaacaaaaaaaatatcagcagcccatcatattatcttcagcaggaaaaggggtaacctcaacatttccagacccgtatcaacaaggtttgatatttgcaggaaaggtagactgattatacaagatggatattcaaattgatgttagcacccgtcatcccccaaaaaagaaaccccgacccactgtacttctattgatgtccgtctcttgctatcagaatactaaaggggttagatcgactataactcaaatcagttaactattgcactagtaacctacaatttgactgaaccttcctcactacgattcatcgtcagaaaggcacacaacctctgtgctggagaccgtccctctggcctcactagtcagcgcaagcctagctgttagccatgtattcagtgatgctgatgcagaagaacctgagggattgacacctgaaatttgagatccagcgtgctggcttccagcacctgcattcagtggacctgaggtcctgtgaacaaccgtgttcaatgacaggggtgccgtgaggctaggatttgaactagatgggagcacaaatggcagtagggatgctaggatagatggtcgttggtgctgatttccatgactcgtggcataaggtgacggcatcctaagctgctggagatgaggagagggagcatgcggttgtgccccagcagctctgtaggtgccatgtggcataggcattggtgtactactaaaaggtgatgatgacattgctctatacatattgccaggtaagattgactgcggttgggtagcctgtgatgatggttgaaccaccagtgaaggttgcacatatggtcctgatgaatgaagcacctgtggtcgaactgctgatgacaaggtaactggtgatgctgtgacttgctctgctacaatccttgcagatggttcctgagaagactgaaccagctgcccaattgtgggtctcgtggatccccctgcaataatcaaggaagaaatgaagtgttacaagcatggtcagaggattgcagaataaatatctgagccagcaacatatccttaattaaattgcctcagcttgcagatcgatgtaatgctaccagctaaggcagaaggcacatagcggtgttccagaacaagaagccacatgtatcagcaattgacattcaaaacaacgaagtatacagcatgcaaggtacatgaacgaggtaagaagaacatgcccaatacttttggataaagtggaacacagatactatgataaaaaactatcaaaccataaacttgatcttagggtttcaagctgaaagactagttatgaccaggacaatattatggaatacaatgggatataatggtaatatattgttggataccttgagctgcagataatggtaggaatttccttcgaaaattctcagccagtgattggtttataaagactttcctgtagatagtatcaagttctgcctccttctgagcgtaaaaagaatcttccttttgaagtaatgagtcatatttctgttttagcttctccatttcttggttatactccactaggagttgttttctctatacataagaagatgtgtggcagataagaaaattcacacaaataacacaaataatttaaagaaaaacagagggtgtagataaaaaggtgcaaaccttttgttcatgaactttactaagaacattgctggtatgttttaatctttccagctcatttttgagaggttcgtcactaaatctttgataattaaacactaatggtgccactggaagaggctgggtgggctgttcagaacttagtgcagagttggactgaacacctatctgattcatgtcttcagagcgtattccttcaagttggacagtctgtattgtggatgatagatccagttggggctgcaaatcacaagtttctgtcgtgcaagatcgctgcactaagtttgctcttgtttctgcagatcgctcttgcattgaacctgatggtagttcagactgcctttcatgtgttgtttccatgcacaaagcacccgttggttctactcctgtctgcagatcccatgaaggcactacactttgatgggcagtagtaatacttcgtggcacaggaataccagacagatcagtcctttcaaatggagcatcctgtgttgaggttaatctctgtgtctcacattgcaaattctgagctgctgcagcactcaacataccttcttgatttgcctctgcaagttgatttggcactggggttgatgattgcattaaaggctgcaaatcttcagctgcagcaatgcacaatactgctcctggatactgaccctgcactgagtttggaggttgcatttctggctgtaaatcctgaattgctgagctcgacataccttcttgttccagctcttcagattgatcctgacctgaggttgatggctgcatttcaggctgaaattcctgagttgcctctaaacctacaggacttgcaattgaatgtcgtgaagtttctggactttgttgggcagggtggcttgtattttgttgtataggtatatttgattgacaagtctgagtttcaacttctgtcgaaactaccaaggcagctgtttcgtgaatgatgtaagttggagattctgagtgtgaaggctcttcggcaacaatgtcatcaactacaactccggtatcaagtaaatgttgttgagttgttgcaccttcctgcaagaaaacaactgctcgatctgattgacaatctgtttgacttatgttgttactttcaagtgaagcatcaaacaatgaggttgatggttgcaattcaggttggaaattctgagctggctgtgtggtaagcaaacctgttcgttctgcttctgcaggtggaagtggtgaaggtgctagattttgttgggcagacagatctgtgctctgttgggaagacatatttgatatatttccctgacttccaacctcactcaaaccttgacatataaccaggctttgtggagtagcaaagattggagattccaaatgggctcgaacatcacaaacagtgttactatcattagcatcaactatctctcgagcatctcctaaatggccacaggtttcacctctctgtgacagaactgtttccagctgatgttttgtttgactgtcgtcatcagggtgcatcctttggagtgaagtctccagcactgaggctgattgttgcctttcaggctgcacatctcgggctgtctccctgctcagggtacttgctggttctgcttctgcaggtggattttgtgaagatagtgaactttgtacgagtggtacacttatactctgccgttcaagcatacttgattgatcagtctgggtttcaacttccgtagacaccagcaaggcagctggtttgtgtgcagcagtataagattgtgtctctgagtcaagtggatctgcagcagcagtgtcatcaacttttgctgtaactccagcagtagcatcaactgaggttaaatgacaggaagtagaaccttcctgcaatgggctagttgatgtatctggttgatgaactgtttgattattattatctgggcacatccttgcagatggagaatccaatgttgaggtcgttgtttgcatttcaggttgcacatcccaagctgttactcccaaattttcagtcagttttgcttctgcaggtggctgctgtgaagtctcaacagtctgtgagccaggcaaggttgataaattagattgagtagccacttccttagaagctgggaaaatcgtgaggttttgtgtagaagcaaccattgttgactccaagttggcataaattccaatggcaggagaagttgcaactcccggcaatgtactaggattggcattgtccctctcaacattctcagtacttgtatattcactggccgaagattcctgagacatttaagggtgatcattatcatatgtctaacattagtaaagaacatacaactacaatgaacaccataataagtccagtacccaatggtacacgaaacaacagagcaaagcatgaagcactgatgaagcatgggcaactaaaaaatggccaatatgttaccaagtgttgaaagctgcaatgaattatacaagctgcatcaactggtacaagatggatgtgctttcaacaaacaaacagtcagtctatcctgcatagacagcaaataagccccactcttaatgcctcgtgcaccatgcaggacaggtaggaagcatggtgattgttaacatgtaacatcaatatgaactgaatgagcaaaataggtgtataatcatttagtcaagtgtcatattagctataggagattaggagataaccaaaactgagcaatcttgctgcagcacccagctcaagcaagtcatctgagttgtggcagccccagttcagtacttccacaaggaagaccaaaacagttgcatgttcccaagtgtgaggtagaactgtagcatatttgaaaacaggggcatatggggcattaaattagtaaccataaagactatggctcctaactataggatttattgcactgcagttaaattgttaatattacagaatcatcactaccaatgataagatatgcacaccacataccacacaaatgtcacatttgatagttccagaatcagaaaacgttccagagacagcaagaatataagaaacaaaatcttgatgtataaattggaaatgaccaatgcaatacctgattaattgaatcatcatttgaaggcctaatactcggtgatttagctttttgtaagccaatgccatcaggactatagcaggtgttgttttctggaaaatcaactacttctggtgctggttggccagcgaccatgaccacttcaacagaaccatttctcactgtctgtgcagaaatgggttctgatggaactacattccttaccagtgtatttaccattttcaatctatcatgacaaagctgctgacaatctgaaacagcgcttccactgacatgggaattgctactttgttccttcaaatggatgaattcttgcataacaaagtttgaatctggtagagcaatctgctgatcaaaggtgtgatctaattggcctgattttgcttccaaacaaagtttttccttcagctgtcgctcttcagcccatgtattagattgcagtgactcaagtttgctgtgctggagtctcatgtgctccagaaatgcatacatcagcatagtgaaccactgaacagtttgttttattgtgtcatttcgggtctctacatcagcatgacttctacaaatatgttccagaactaaattgcacactgttttcagtctggcagttttattttgtgtgtatttctctaactctgaaatctgagactgttgtttatcaaagatacggtattctcttacagagaaaacattgtcaattaagttgattcttttctccacaatgtcaggaagttcatcagttgaaaaatggcattccatgtgagttcctggaacagctatcagttcctgctcttctgaaaccatttgtgcagcaacaaatgagccttcttgaagtgcaccattcatgaaattatcatgaagatccattctctgcttagggaaaatgtggtcatttctcaagatattagaggtctcctgctgtgaaggtttggtcttttctactgatgttgattgacaattgctgccagttgcacctgctttctttggaaattttctctttaggctgtcatagaccaaccttgccagctcctcattgcactcgtattttaaccttttttcagcaagggcaagtgactctttatgatccaccttaaagttatgaatagaggcaactcgccaacactgaaggaaagtatttacgagcattagcatttttggtcaatatgaatctgaaaattaaaagaacgacgatattgggggtggttattcgtaccaaagctatgttcaacgcatgaaatatgtactttggctcctgaacaactacatgattattcaaaagatattcaaagaactgctcaaccagcaacgtaacattgtcctgcaatagtaattaatgcgaaagcattaggtggtgatgacaagccaaagcaacagaaaaattacaaataatgagatcagcgttaacaaaggtaagagttatatgataaaaccaaaaaaaagacttaacaagaattattttttcccattaagagcaagtgtgactgaactgcggacagctggagtgtcagacacagccagcttttctacttcaggttttttcccctaatgtctcatgattcaaggtgttaatagttagagctcctttacagtggacttttgcctccgtaatctcttgactgagttttgagggctttttgttcacttatagcataagtgagctaagtccatgaataactgcacctctacaaatttttcatggttgaatatcttaaggatttagttgtggagaatcgctgcttttaatctaggttgatagcgctactctttatatgattgatgctactcttaagcttggatgagtgtaccgtcaccatcatgaacttcaaatttttagtaaagatcaaagaaagattccacaactcattattttcccacctttggggaaaatgatagtttagtaggaaacaacaacatccactcactacttcaatgagaacttgtcctgctattttcgctccattaaactgtattgtattcttcaaatatatttgatatagtcattacaccatgtaataggataatgtatgttattttctgtttatttgaaacccgtaggccatagcaatgcataagcacctaactagtacacatcatgcttgcaaaagatatgataggatagatatgacttcagcgcatgatgctaaagtgtatcataaggaaaaaaaattgacagagcttaggatatccgtaccggtagttgtaacaccttaattaatttcgacaactcttgcttcatttgggcatgaagattcttgggtgtactcatcaggctttccgacccttcagattgaactgtgttagaaaagtgcaatgtgcagccgcaaaagaaaaggaaacaaaaaatgctataggcatattcacagcacatgaaaatattattattattattaaatagtgatacctgatttttgctgcgtgacatcaactggttgaagagcagggccagatgtagtacaaatatcaggcaatgcatcatcgttacttttgtcagatacaacttttgaagatgaacccataatctcaccaacctttctatgcttctttctggcttcattgatttcttcagccggagcattgacctcatccatggtctgggactttgtaactcttgattgcagtggctcagatatacagctcacatgaggggatcttccatccaataaatttaaccagaactcagctggattatcctcaagcacagagattccctccttttcacccatcagagtaatatttcttgaatatagttccccactcatattagctttgcttatggacttcctgtgtacttcagtgctgtcttcaacagttgtggataactttgttaagaactcaacgattacttcatcaataaagtgtctctccatttcagaacttttacttgcatggtcatcttgctggacctcatcaagtctactgaagagaaatgcagcaccccatctgagtaaggaatgttttaaactagtccttagatcttgtatgttgttatcaataacaatgccctgcctcgcaagaacaagactcttctcctcaactgtaaaaggagtgtacaagcgaaaaatgctcacacgctcaaattgtgactctatcttgatcttttgaagagccttcaagtcgtttagtgggttgttgtcagaaccatatatgatgatggcatcaatagatgaaagcttaatgcttgggaggcacgcacgattttcaatcagaaagacaaatctaccattagtcttgttgttgaacttatcaattgctgcctgtttccttgacaatactgcacgatattcaacacgttcatatgattctgggccaaatctgtgatgcataagatcttccaaaatatttcccattttgtttccacctgctctatcagactgccatagtgcaaaaaaagaaggttcaagatatgctgaagtaagaaaataggaaatgctatcaaagtcacaggctccaaagaaaatcaagggaaaattggaaaagtataagagaaggggacactaactgacacttgaggaaacaagtttgaaccaagatgaaattatcacatattgttccttttttgctagtacttgttatgtgaaaaacaattcagcatgccatagcaacaccatatgctgccatgacttgttgactctgtagatactacttatatagccaagagcccaagacctgatggatacaccgtaagtccatagctaatgagtatgcagagaggttcactacaagggactatttatggtgttcatagttcaaaagctaatttcaacaacccaacttctaactggtaagaagtgttgttaaatatcatcagttcatctaacagataactagacatcttcttcgatgataaatcattcataacatagattaactaaggagtagaatactaaattgtttttgcaaagctaatttctagctagtaaaacttatcattgcataaggcagaagtaaaaaaaagggggaaggacatcagtattgacctggaaaagaagaatgacccttaaactcttcttcttgatctcgttaagcattttgtcgagaaccagtagcttgccacttgcatgcaccaccgtatctatattttcagttacattgctattgttgctaagtgagcttcgcagaaattcattaacgatgtaagggtgatcgcagcactattaaatgatgacaaggatcaaagtcagaaaacaatgtcgacaacttttcaggaaaaaaaggtaaatatacatgcagattgtatgtagattgactacttattatcatgtggccatattttttttttaaagtagacctttttgagagacagataaatatcatgaagagctccaacgctatcagtttccatctctgaccggaggacggatgactttgaaagcaatatggaacagtacatctctaactgcggttgtgaaatgcaagatggaacccagtactccaaaaattttgaagaatctgttttacgctcatatgcaatatgatgtgtgaatcttgcttttgacatcacaagcgcatcatcagcattgacatagtcactataacctttatcttctgaattaagaaaagctagcaggttcatgtactcaggaacattatcctgcaaaatagcaaagagattacatggcttattcgtggtatacaagcaatcttacaggccagagttgataagaaccttgattggggagcccaaaagcaccattctaaaatcagtagaaattttcttgagttgttcaaaatatttgaatgcagagttttcataataatcaactataacagcttcccagcgaatgcgctctatagtttcaatatcctgtgtcatggaagagagatcatgattagatggaaaaaaggaacatcattgtgatacagaggtggttgttatgcactcttgataggcaagcagcattttcttgtcatgaccagcagaaaaccttgttaacaattacctctaggatagcatcaggatgggataagagaacttgtaacatcatgcagcgtctgttgtcatagaactccaggtcttgaattaatttgagagtatctttctgcccatcatacacaacaacattgataaatggtgccaagtgattgaactgaatctcccatgcagaaagagaagcaggagtcgtgacgatcagtaaaggttggcagacatcaggtaatacagtcaacgtgaacaagatggtttttgttacgtattcctgcatgacacacgagttaaatgatatttcttttatgtagaaagaagcattgagttcaaaatatatcaggcaatcactagataattttcctatacgtagaaactactctctctagtgaaaaaaataaagtagtggcaggattctgtgcagtcaaacttttttaactttggttattatcttcctattgacaatcgattagaggtgtgaaaatgggtatgtacaggtttgtcttgaaaaatactttcataacattgtaatttcactaggttctataaatgggtgagtattttgctgaaaccaaattaggtttaacctccatgggtatcaggtgtagaaatgtacagaaaaatctcaaaagttgtagatgtagggaaggcggtattctctgttgagtaaatatacttggcaagaagtgggatttattactacttgcatattaagcagccatgttgaacaagtttggtgagtgggtgcacaagaactttcgaactgagcactctacaggatcatgtgaggctgctgtaattgctgagggtttgggattgcaaatttctgcaatggtggatcatgcacaccccatgtgccccctcacccaggtggacactcactcgtcaaggtatggaaaaaaaacacccagattactcttctatatttctatagaaatgcaaaatcccaacataaactgaaacacatttctaagatatgaaaaaagaacagatgaattttaactggtttgcacagaatttatactccattaaggttcaggaaaatacagtagaaatcagcaatcctcattcctcaattgagttttggggacagtggcaatgcccacattgcttgttttgttggatggagaaacaaaccagaatatgtggggtgaaaatagaacaagaagctgcttttcagcccaaaatattaaatatatcactttaggtatagtagtgtaatgctggtaataacttgcataattcctagctcctaccttatcatcaacaaggacagcaccatgagatttgcaccagaactcaagaagttgattgatagaaaacaaatgatcgttgtcaaaaccaggaggccactcgtctggtaatctctggagtttctgaaatgtcttatgcttaacctgcaagggtgatcactattacagtctgtgtttgcaaagagaaggttcataaaaatatacccgtgtttataaagaacaggtataacctagatagtattactaaaatgaaacaaagaaaaacgaggtcataaatgcccagtgttggataggtgaacagtaagcaaaagcaagcaatgaatggtgcatgatgcatcaaatctatatgaaaaatatttcattcgagaaataccaggaatagaacagggggctggggttcaccaaatagttttttttttacctaaaaaataagagtgtgggtggaacaattcatatgtgaacgtaacagtgatcccaattttaagttttcaatgttttgatagcttagcatcaagaatccaagattgatcatctcaaatagaacaggaatctaaatatcacatgacataacctaggtaatatataacttagagaacgtacaatacatttttgtgatgtttgtcgtattcatacagtggactataagactaaaatgtatatggcacgaatatcaaaacggttatgctatattgcatttatttaagatgttatcaacaattatatttactctagacaatactaagagtacaacatataaaactaaaattagtttcagccacacctttgtttctacgggaatagatgattgcttagcagctttacggcggttctcatacttccttttaagttcatcagcctgaggagtacgcaaaaagcatgcagtttccagttcccatgttgcatgttcatagccaagatccctccatttcactaaccattcaacattacaatgctcaatgttagcacgacttgaacaaaaaaaatcatcagcttcttttgggggcataagtggccttttcctcaacaggtggtgtggctcagtccattccttcttccaatttgtctgtggaattatgtaattgaacataagcatagatcttttggccaaaaaaaaagtgtcattccttaaaaaatataaagaaatcatattcaacacactagtagccaccttttctttatgatccctcttattaaacaaggacagaagatcacaacctccaggggtgtcattgataacaccttccggaacccagcgattatggacatgtgccagattcttatacttcacaaggtactgcttgccattctgcattcctacaaatatggcagaaatagtagtaaagttaggatataaatcactataaaagattatctttaatgccattgttttttcttcttaccctccttgacattccacagagactcaattccatcagcaacagagtgtattccaaacagcaacctcttttccgtacagacagtacagaaccacataccaggagacaaatattccagccaatgatccagacaagaaacatggtagcttcttttgcagccttctccatcacaggacctataatcaattgatggtatgcattatcatgtatggtgatattgtgtatcagaaaccaaaagtatatctggaagaccaaaatcatattccctctgtcacagagtagcctctagcatttgccccaaactaagttcatttctgtccccttaactaccttacctacccacccaccaatactacttttctattaataagggacactttgatctttttcccaccatactaatttgaaccccaattgctagaaatgaacttattttgggacagagggagtagtgcacaggaggagatttaaaactttaacaaacagtgttccttttagtgaagggtatttcttgtattcccactttaatacaaggttttgtgggtatctcatgtgtgatgtatatatagccccttgaggcttagcaatacaacaagatagcagagccaatggtttagttcctgccgtcatcttccactacggaggagtgaactccactaacctgaatcacaaacccgactaaaggacaaataccataaacaactaacagttttatcatgctacacaagtagacagtatagaagaaaggagatatacatgtacacttgagatgtcacgaagaaaacaagatgcctatcagactattgtaaatgtctatgaacaagcaaacatttcatagatattcatgaatttatgattgcacaatttttataaaatctcaaataaatggggaacttggatactggttgaagccaccagatttaggaatcagcgtgagaagaactttggcgatttgtattaatacgatgtcatgccaaacagcattgttcactctcttgtacatatatatatgacgcataataagttataactaactctatattctttcagttcagaaataaaatagcacactaaattaaaacttatcagcaccacattttagcatctcaatgaaattatcagataatttaaaaggcaaattcttcaagatgaaaaattagtagatttagtaatgtagttgccaaaacagaatatggtactctctccggtcataaaattttgacgtttggacaaaatttggtcgaacatttgaaaactttgaccattaataatttttcaaatgcttagtttaaaaaaaatgtcgtgtatatttgccttaaaaattactatcattgtaccatatacttattaaaatttataagttattctaatataaaattgttagttaaagaagttcaaccgaatcttgacttaaatgtcaaatatttatgaccggacagagtattaggatgagaaatttacaacaggaatacagagtattaggatgtgaaatttacagcaggaaatgcaacctcgagcatagtacagaaacatattcctatcagcaaattatagatgaacacaggcacacataacatgtacagccagattgcatagtcgaatgtcagaaacagaaatagattgacccacacctagaagtctagaacccatggggaactgtaagaaagggaatgaacattgtatcttccatttcaagggagaaaaggaagcaacatttctacttattgttttgggcatcaacatggtctccagttcatgtgttttgcagcttttgctattttacttatttcatgctccgaaaaggtactacaaatacagtgatatccaaatacttaggaacctattaagatcagttttacgtgacaaatgacaaatccatatagttttgaatatatcagtactcaaagttctaaaacagtgaacatgcatgctctagggttctaggatattaaacagatgtagtaacataaaagcagtttgaatgttttattttaaaattcgcagttctgctttctatcctaaaggcataagtccattttcccaaactgattgtcgtacagaagagtaataacaactgatgtaaatcaagtgtgaatcaacttacttaagatctcctggggtaccacaagcaacgcatatgttggaattgccctccatttcatcagatgcggtcaccttgaactgacttgaagctacttctttttgaatgctaaggggttcaccatctccatgtccactctcgggctagcacaacaccaaaatattataagagaacaatgtataaccctaattccactgatttgtaaaaatgcgaaagcacatatattccagctatagcttgagagtacctcctcgtaatgaataggagggattggggcactttgcaatgacgatatagaattttgcctgcaaaatggaaatattatagcaggaccaacattaatttgaagtgcatgcccagtataaaagaagtatccatgactaagaaataaagcaccttgaatgcccagtaggccgatctctaccttcaacttcaagtctactctcagcaactttgttttgtgggcatgtttcgatagatatatgttgatgtacctgccatattgattgacgagaaaaggttagccctttccaaagtggatgggaacttcatccatgggtccatccacatggttggaatgtgatattgggacatccaagagaaccataagtggataagttgtccagctaagatgattaaagaaaagtaatagatgataaaaatgaactattgcattgggtaattagagtatccagcttaagtgggtagcttgtccagctacgatgatcacagaaaattacaaatggctttatcaaattctagacagaacatacaaatatcatcagaaaactcccattcagcagacagtcaaaaaattagcatcaatattgattgcggtgaactaggaaagcgaaaggcaaacctccgaaagcggtccggcagatttgccaactcttggttgagaagtttcatgtaaaccagaaatagaacttctggaaactttagtatcgtttgagtgcttcttgtcttttccaatcaatccgccaaattcacataacataccagtgttgctctctgccacattcccattggaagtattttccttgcccgctctgtcagaagcaacaacaactacatcggaaaagttggaaaatagctcagatatgcgtgtttgggtgaaacaaatgcaggttaaatggccaatagcatatccaacggaatgtctaataaactagtagaatacaactgtatgtttcactggaacttgataggaaacttgcatgttgatttcatgctagataaagtggtttggtgtgattgtacgatggtttgctttagaaattccacctgataggcttactttaagaacctaaaacgtcaactggtttgtaggttgtagcataaagttttggtaaaatatcccatccatcttgcaacgtaagaagcaccatgcaaaaaattacacttgcattgcgtgtcgacccgttaatttgttcacgttaaaaccttcagctattcctaaccatctgctgccacttggcgaaaaaaataccgaactctgaataatcagataaagcatgagctgcaagaagtacctgtggagcttgcttttttggatcgcttgaaaagtgatctgtaggattttgcggtcattcttttccgcttctttgataaactgctagtgcttccaaccccgctgctatgctcttctgcaacatccttagaactagcggtggtggtgctagaagatctggtgggagctcttgatgttgaagaatttgaagcattgttactagccctttttaacattccgacgcgtgctacctcggctacttcgtcttgttgtgtgccggaaagccttggggaacatctcctggaggtcggcatgtctggccctccacgcagaggagagcggagagaggccatagccctctggttcgcgccgtttgtgggtgcagagaattgtggatttccagaagtacgcgaacgggttgggtacccggtgcctgcgtttgccctggccgtactgcctccaccccttccatctctggatgttcctccgggctgagtcttccacatgtcacctgtttagcaccattcgttgaaccaactcttggtcaatcacagtttgcacagccccgcaaagtcaaaacccgacgacgaactgacgaacaagccaaaggaagaaggagaagaaaaacaaaaattggtataaaaaaaacaagcggtggcgccgataaatgcaagcacggaggagacgcgcgcacccaaaatccggcgcggaggggtcccccgcgatccaggccaaaaagcacaaaccctaactcctcatcagcattccatttcaggaaaagtgcaaggcgggcgggagaaagacaagggggggatggaggggtcgggaagggggggcgggagaaagctgtacctctggggagcgggcgggcggcgaccgcgaccggattgcggcggcgggggacggtgcgggcaggggtttgcgcgatcgaagtcgaaggtagccgtgggccgtgggttttttttggttttggagctcccccaacctcccaagtctcaactcccgcaacttcctcccaaaggagaagaagaagaagaagacgcctgcgggccctcctttccactctcggcaatcccctccgtctgcggctatactaccgcgccagttgggataaacacggagtagcttcttctgtaagcagcgtctctccccctatatactactctacctcatactccttataaaggcgaaaatttaatactcatttaaatcgcaggattaaaaaatatataaataaaaaacataagatttttgataggaatgttccttttgaattgaaggaaaaaacataaaaattctaggattttattctatagaaaataatcctacagagtcctttgaaataaaggattgtttcctatcaacttctttgaaatttctatggaatgaaccttcctagagcaattttggaagaaaataggcatgaggtctcacctcatgttttcctctttatattttttcctgtgtactaatcaaacgatggagactttcatgtgtttcaaaattccataggaatccaataagtgcagcattctattcctacgtttttcctattcctctgttttctcaattctacgattcaaagaggctaagtgtaaaatagaggattacaagatgttggaaaaacacaggaatgatcattttattgaaccgcaggaattggatgagagagatagacttagggcccctttgaattgcaagattgaaaaaaacgtaggaataggaaaaacataggattttgatatgaatgtaagtgtaaaatagaggattgcaaaacgcaagaaaaacacaggaatgacagtttgattgaaccgcgggaattggataagagagatagactcaaaggaaggttaccaagaggttgaagctcttgctaaatttcctctaaaatctctataggattgtacatttcataggaatttcaaagaattggatatgattcaatcctttgtttcaaatggcttcataggaaattttcttatagaattgaaattctccaaaattcctatattttttctccaatttaaaggggccctaaaggaaagttaccaagaggttgaagttcttggtaaattttctccaaaatctctataggattgtccattccataggaattgtctatccaatcatttgttttaaagggcttcataggaaattttcttataggattgaaatcctccaaaattcctatatatttcctccaaatcaaaggggcccttacaatgtgagaactgcaaaatatctgaaatccaaagtaaagatcttcatgctccaccttggctggggtgtttgagaggagaggaaaaaagaagattgagaagatacgcaaaacgaggtgatccattaacgcatgattaattgagtattaactattttaaatttaaaaatggattaatatgatttttaagcacctttcgtatagaacttttttgcaaaaaaacacaccgtttagtagtttggaaaacatgcgcgcggaaaacgagagaaatctctctctttcacctttttttgacgcaaaaggtatacaggctctaccttatagggcaaggccaatgcttatgattccatcagccatatatgtgggacccgctttagtaagcattagctatgtccatatccacaatggacgtgcctatgggagaaaataagctgggtcccaatgggtcccaccgaagaaaaaaaatatcacttcttatcctcctgtgaaactctttgcacaatgaaaattccccaaaagtactagtatgaacaacacatcacaaaagtattatattctatagtcttgttgccgcaccataaggctaatgctcacttttgatgtcagatttttatggtccactttcacaatgattaaggtgatgtactgtggaattatttattgcttaaggtcaattttagcacacattgtggttgccctaaccattgtattaatggtgagtcaaaatggaacaatgtcaagaaacacacgttgttgtgtatgaaagaaaaattacaatacgtacaaatacacttaggggttgtttagattgatgtcatttcaaccatattattttttttaagttatcaaagatgtgcatagatttagttttttaccgaactttggtaaatatataaggaatttggcaactacatgatagtggcacaatagtggctatcatgccaaaacttggcaatattgtcaactaccaaaatttggcattgtcaaatttggtaatgtttattttggctataatctgaacaaccccttaggctacgttttggaggtggagtttgtccattggtgcacaattagttaagtattattggagcagaaactaccagcatcgagtctggacaagaagattgagagttggtgtctaccgccggaaggagttgctaaactaagggtgcgctcttttcagcttataggattagattctcctcattttccattagcacgtttttcaaactgctaaacgatatatttcgtgcgaaaactttctatagagaagttgtttaaaaaaatccaacaaatttattcataaaaaaatatattaatacttaattaattatatgctaatcttatttctcgttttacgtgcggctaatcagcccaccgcacctgctgaaacaagcgcaccctaaatgttgacgctggaagaaacaggggaagccagcgccggtttattttcagagactgcaggggtttggtgctactggccagccacaaaaccttgcactgttgtgggtctgctgctcaagctgaagcattagcatgtttagagggtctccaggcagcggttgaatggatccacatgccaattctgatggagatggatgatgtagaaattgtcatagatttacaacaatccgggccattaaaatcgtcttggtcgatgacgatagctgagattaaaggtgtgatgcagtgtcttcagaatgtgcaagtgcacaaaataaagagataagcaaataggatagcgcatatactagcctaaatggcaatgagtactgtatcttttgcagagtggaggcttagagcatcaccaacagtctatctattccatccccaatcctgattttttaggattttggttaaaaaaaattggtccaacagatttccaaaagagctccggacgttttagagttcccatctccagttttctcggtatgtgtatttgagggtgagagaccgactccaaatcctctttcccgcgcgtttctcctctccttaccccgctccttctgcgcacgggaaataaaaaaactagaatttctgttggtagtttaacagaagggcccacttttagtttttggggaattgaatttaggctatctcttggagggagaggttttttcaccacctattttcagtttaggaaacccaaaaatcaaattttggggatagattattggtggactgttggtgatgctcttagatttattagaccaggaatgtaatcccttgttctgacaataataaagtttctctctttagactcaaagaaaaacttgaaaaatcgattaatatgatttttttaaagaaaaatatgttagaatttttttgaaaaaaaaaattaccatttagtagtttgaaaagcatgcgagagggataagttaggaaagtgaacaaaagaactcagccttataagatactctcttcattctataatattatatgttataagatatgtttagatggcatccacacttcgtcacactttacaaactgtaccacaatggataatgtttggctatgaaatggatttatgatatggttaatatgtggggtaaaagtgtagcatgaaccaaaatgcttacttaaaaactgtggcgtgactaacgtttggcattatagagtgcggcactaaaccaaatagacccttagcctttttcacggatattatggcctggtttagttcccaaattttttttctaaaaacatcatatcgaatctttggacacatgtatggagcattaaatatagattaaaaaactaattgcacagttagagggggaatcgtgagacgaatcttttgagtctaattagtccatgattagccataagtgctacagtaacccacatgtgctaatgacagattaattaggctcaaaagattcgtcttgcggtttccaggcgagttatgaaattagtttttttatccatgtccaaaaaccctttccgacatctagtcaaatatccgatgtgacaccagaaaattctcttttagcgaactaaacaggccctatgaagaaaagggaaaaaagactaggctgcctactcgggataggtgaagggttcgctagacttgttgggtgctataataaagctcatgggtagtttcaaaagttaatctaaactttataagttgtgattatattttgagatggagaaagtaaaggttatggttgaaaaaaatgagttggagggttgataattgaatatatcggtgagatagaaactccaaaaataaaatagtgtttaggtccttcctccaaaatttcaataggttttataagagactccatccctgaaaaacaacttgaatgacagatattccagtttatttgctccctcagcttaattacctttattttttccatgttcaaagcatatgtgtgtgtagtactcctagtagttttcttaaccagtgacaaataatctgacctcaaagctcaattaacgggtagttttcttaaggaaaaaatacgaattaccccccgaactatcgcggtcgtccgaattaccccccgaaccataaaacaggacattcttcacccccaactatgaatactggacgaattacccccctcgacccaatccgcggtggtttttggtctacatggcgtacacgtggcaatccagtcagcattttatttataaaaaattgtgggacccacctgtcatatactactctcttctctctctcacacactctctctctctcactcttcctctctctctctcaccatttcacagggtcagcggcggcggggcacacggagcgggcagcggccgcggcgcgtgacgcagaggcggcagcggcttccccctccctctcgtcggcggcggcgatggcaggggacatggagcggcggcgtgtgacgtggaggcagcggcgacgggggatgaggagctcgacgcggcttcccccctccctctcggtggcgtgcgcgcaggcaggacgaggacgcgagacgagaaggcggtggaggaggcgaggcgaggtagcagcggcggcgacggcggatgaggcgagcggtggcgggagctcgcgctgctcgaggcggggcgaggcggcggcggaggaggaggcgagcggcggcggggtgtggtggaggaggcgagcgcggtggcagaggaggcgagcgcggcggcggaggaagtgaggcagcggcggcggcgaggcggttggcggggcgacgacggcagaggaggcgagcgcggttgacggcagaggcgacgtggcgagcgcggcggcggaggaagcgaggaggcagcggcggcgaggcggttggcggggggaccacgttggcggtgggtggggcttcggcaacctatgagacgcgctccacggcggccgctgcctcctcgtcgtggcctccgtccgtccgtcccgcaatgctgccgcctccacgtccggctgtcccatgcgtcacccgccgccgccgcctccgtgtccccgccaccgccgcttcctcgttcggtcgccgccgcgtcacccgtcgccgccacctccgcgtccctcgccaccgccacctcctcgtccggttgtcccgcggtgctgaccaccgtcgtttacagtgagggagagagagggagagagaggaagagtaagagagagaagtgagagagaaagagagtgagagagagaagagagagtagtgtatgacaggtgggtcccacatttttttaaaaatagaatgctgacttgactgtcacgtgtacgccacgtagaccaaaaccactacggattaggtcaagggggattcatagttgggggtgaagaatgtccggttttatggttcggggggtaattcgtactttttccttttcttaaccaacactgacttctagtagaaataaaaaataaaataaaaaacttcttttttcctcggaggtagaaatatatatatttaaaaaaaatctcctcttagtagagaagaaaagatacaattattctaatttacccttatcatattaaatctttagtttttgtgacccactaccaacagtgaatcgacgattctcagcccagaaagcctgctacagtactacaggacctcacccttcatgcaccgtccgggacgatgtccacgggttcatcgatccatccgtctacgcctcatagccgcatcaccccgatcccctccgtcatcgctcctaaccaatcagcgcacccatcgtcccaaaatccccaaatcttcatcgcctcctcgtgaggttcgtcggcgccgacaccgccttcttgcggagcctgcggccagcgtcgccgctttcttgtcgagccagcgagggaaatcgcggcgccatcttcgccgccctcgccggaccagcgtcgccacggagctagccggcggcatctgcctgctcacggagccatcgggcaagcgccgcagccgaccgccgccctcgtctcttcggcgatccagcagctgccgccgcctttcgtctggtacgcactccttctcctcacggacagggaatgcatgcaggttactgctgtctccaaatccacatactctacttaattttcttactgaaccggccaatttcactcagctagctgctaacggttgtccaactagctcgatccctgtccgtgctgctccgtatcctctttcattcgtcagtttcaggtatatatccatatcacttgtcacgctcagaaattcacggactagaatttctaagctgaatgtgcattaaacccctgtccaggaccagccagggtacacaaacgacaattgttgacatacagatccacgtcttacaaaaatataaaagattacaaatgcggcggaaaaagataaaagcgagctaagcctgaagacttgactcctgcagcgagcgactccattccacaggcatccttgacggcagcgacgaaaccaacctcttcgagacatcttcaactgagaaggacttcaactctggtgtgggggaaaagagagcaagactgagtactacccactgtactcagcaagtcataccggaagaggaggtatgatgcaagatatatccaagggaggataaaggttcttttgcataaagccggcatttcaaagcagtagttgaaaacagtaaaacagttgtagtaattaatccatattaaccaatcactgtccaacgttacaccacgttgcaacaggcccaaaccaccacctgaactaatcagttccaaaagctaactagggtgaaactaatcacggtgaatctggtcgaccgcccataaccgcgggcacggctattcgaatagttttactctgatcagaggtgtacaactgtacccacaagacacagccccacgacacgttcctgtgcgccgacatgccaccacgacataccggaaagaggccgtgacaggacccttcgcataaccccctctaaccgatcgcaccacaccttagggttcgcccccgtccccagcaggcaacgggcagcccccctttcgtgccgcggtgaatccggaagccgatcaaccggacaccccggccgacccaactccatcacgcccaccctcgcctaggtacgtcggctagagaaaagctacactacaagcccagccgttgcccacgctggcttgtggtaagtacgataaattctttcagggcatcccgcgaaccggtccttaaatgccatgggtgcgactagcaagaccatgcacccacagcccaccatgacgtgtattttaattaaccaacaccattacggtggcactaaatcaaagctatgccaataatcaagtctatgctttaatgtgatccccctttgtgcactagttgaactaagcatggctaagcatctcctaaaccaacatctagtcattttaatacccacgttatcaatggcataaggtaaacaatatatggctgagtaataggacccatcccacatgatattgtaaaacaatgcaatatttaatagaaatgcgggatatttgtaaattgggtacaatatgatcaattgtattgcatgacttgccttgctctcgcactgatgagaccacagcaacgtcttcgagaaaccacggattgacgaaccgaccgaaatctacgcgacaaacaaagcacacaagcaaaacatgctataagactactgaaacagagaacaaagccatttttaatggattctacacatttttatgaatttactgagacttgaatggatttaatcggagctcggatgaattagatatgatttttagaagattctctgtgtttttactattaaagaaaagccttaatcaatttattgcgcaatagtgccccagggctgacgtcagcaaggggtggggcggcgccgacatgcgggcctcactggacagaggcacaagagagagggagagggggcggctggcaggcgggacccaccgggcagcgtcacaaggggggggaagcggcgaggcgcccggtcggtccggctcggcttcaagccggccggccggttatggcgagggcggcggcggcaagcggccaccgacggcggcggccggcgatgcaggcgacggcacttcacggcgaagcgcatgcggggagcggcagcgcgcgcgagaggaagagaaggggagggagttctcaccggggttcggccggcgtgggagggtacgacggcaaacggtgacggtgagcgaccggagggcgacggtgaacggcggccgagctccaggacaccctaagagaggaagtgagagaggttagatggagagaaggtgtccacggcgagtgagagctatggccgacggcggcagctatggtggaagctcaccggagtgcgaggagatgcgagctccggcgatggaattggacgggagaacggcggacgaggtggacctcgggatggcggacgcggcggcgccgatggcggggtgcggcggcgaccctagcggctgctagaggcggccggagcggtggagatggcggcggcgggtgggtgcacggtgctagggcgatagggagctcgggggcggacggcgaaagagggaaaaaggtggagagaggcgcggtggtcggttatatagaggtggggaggccggacgtggccgggagcggcggttccgcggcgacgacgtggagaggtggaggaggagagagagggggagaggattcaaatcgaatcccgtccgtgcggacgcgcgcgcggacgggagagggcagggcgtggggcggcgacgtggggacgtgtgggcgcggagtagggcgcggatgcggaggaagcggcggcgtgggcggcggtttcggcggcggatggtggcggctgccggaggttagggacgaccgacaggtgggccccacctgtcggcacccgggaggagaggggaggtgggatggacttcggggaggggaggtgaagcgggccggcgctggagggaatgggccgggcccaaaaaaaaggaaaaaggagggaaaagaaaagataaaaaggaaaaaggattttcccagggatttatatgttgcacatgctcatttttaattggttaaaattatttccaatgctctgaaaattccgctaaaaatcctgttagcgtattttgacatgtagaatccaagaaaaattccacatgccgattccgattattatttgcatttattaattagggattcatctctaggttaaattaaacaatttcttcggacgatttattttatgaatttagagcaagggaggggaacttcagggcgagacaaacctaccccccttaaacggaatctcgaccccgagattcggaagagttggcaaagaggtgcggatgagcggctctttcccaggtggcctcttcttccgagtggtggctccactgaactttgcaaaacctgatcaccttgtttctggtccttctctcactggtctcgaggatacgaatcggcttctccacataagtcagatcttcctggatgtcaatgtgctctgagctagcttgttccttaggtaccctcaaacacttcttcaattgagatacatgaaacacatcgtggataccaaccatattagatggaagctctagctggtaagcgacttcacctctgcgttccaaaatcctgtatggtcccacaaagcgtggtgccaatttgcctttcgtctggaaccggtgtactccccggagcggagtgacacgaaggtacacataatcccctgcttcgaaagtaagctctcttcggcggttatcagcataactcttctgccgagactgggcgattcgcagtctttccctgacggtcctgactttctcctctgcttcggttaacacttctgtcccaaacagttggcgctcacctgtttgatcccagaaaagtggtgtgcagcactttcgtccgtacaatgcttcaaacggtgccatttgcaaactggactgatagctgttgttgtaagagaattccgcatacggtagacttttatcccaggctccaccaaagtcaagtgcacaagctctcaacatatcttccaagatttgatttactcgctcggtctgaccatctgtttgcggatgataagccgtgctgaaattcaaacgagtccccaattcttcttgcagtttctgccagaactttgaagtgaattgacttcctcgatcagatacaatcttcttaggtaccccatgcaaacacatgattcttgaaagataaagctctgccaacctttttccagtataggtagtgtgtactggaatgaaatgagcaactttggtgagtcgatccacgaccacccagattgaatcgtgccccgacgatgtcctgggcaaacctgttatgaaatccattccgatttcttcccatttccattccgggatctgaaggggttgtagcagtcctgcgggcctctgatgttctgctttgactcgctgacaaacatcgcaaagtgcgacgaattcggctatctctcttctcatgctgacccaccagaatttctctttgaggtcctggtacattttagtactgccgggatgaattgaatactgagtttgatgagcttctgtgagtatgagatccttcagttctttgtcgtcaggcacacacaatctttctcccaaccagattgtgccatgctcatcctcatggaaatctcgagcttttccaaccctcatattctttttcagctcagctatttcaggatcatttacttgagctgctctgacttgatccacgagcgtaggccgtgcctctagggcagctacgtacccgtgttccacgatgcccaaatttaggtgctcaagatcttgctgcaatttgccacacatgtcttcagtgcataaggcattgcaatagcttttcctgctcaaagcatctgctaccacatttgctttgcctggatgataatgtatccccatgtcataatctttaattaactccagccatcttcgctgtcggagattcaagtcaggctgagtgaagatgtacttcagactcttgtgatcagtgtatacttcacagcggttgccaataagatagtgccgccagattttcagagcatgaaccactgctgccaactcaaggtcatgagtggggtaattggtctcttgtggacgcaactgtcgcgaagcgtatgcgaccactctgccttcttgcatcaacacacatcccaacccttggcgagatgcatcacagtagacttggaagtcttttgtctgatctggcaaaattagaactggtgcagagactaacctcttcttgagttcttcaaaactttggttgcactcagctgaccacttgaatttttcatctttctttagcaactgtgtcatgggcctggcaatcttggagaaattttcgatgaaccgacggtaatagcccgcaagtccaagaaaactccggatttgagaaactgtctttggtggggtccactttgtaactgattccacatttgatggatccactgccacgccttgagcagaaatgacgtgacccagaaatttgacctccgataaccagaagtcacacttgctaaacttggcatataactggtgctccttcaatttctcgagtaccagacgaagatgatgctcatgttcctcttctgattttgaatacacaagtatgtcgtcaatgaataccacgacaaacttgtcaagaaactccataaacactttgttcatcaagttcatgaagaaagccggtgcattggtgagtccaaatgacataaccgtgcactcaaacaacccataccgagtgatgaaggctgtcttgggaatatcctcttcccgaattctcaactgatgatagcctaatcgcaggtctatcttggaaaacaccttagctccttttagctgatcaaacaggtcatcaattcttggcaacggatatttgttcttgattgtgacctcattaagggcccgataatcaacgcacatcctcttagtcttgtctttcttctccacaaagataaccggagcaccccaaggtgaagtactcggtcgaatgtaccctttctgcagctgttcatcaacttgctttttgacctctgctagctcattagctgccattctgtacggcctcttgtaaattggagcagttccgggtgccagatcaattcggaactcgatttctctcttcggtggcattgtagtgaggtcttcaggaaatacctcaggatattcttgtactataggaatatcctccaacttcctgggacttttctccactgtttctgtctgaccctcaatagcagcctgattcagactcgctacggacttctgtgacactggagaacggaaggtgatcttctcccctttgtcgttggttagggtgatggtgcggcctgcgcagtcaatcacccccttgtgtctggtcaaccaatccattccgagaatgacatccaggtctttggattcgagaaggatgaggttggatagaaattgtgacctcttgatctctatagtcactgaggggcaatagtgtgatgtcttcatgtcatttccagaggtatgaacctgcatcggtattttaagttccattaccgataatccatgtgtcccagcaaatctcttggaaatgaaagaatgcgaggcacccgaatcaaaaagaactgttgctggatatgagttcactggaaacgtgcccagcacgacatctgatgctgcctgtgcttcctctgcagacacatgattggcgcgggcctggatgaacctgggtctagtgcgattcagcttcgaacacttgctagcaaagtggccgtgcttgccacagttgaagcagggtcctggctttcctacagcccccttcttgggttgttctgactgagctgacacagctggcggatctgactgagctggtgccattagtgggggtggagtcgagttgtggttgtgctgcttactgttgttgtgactgccaccgttgtaatcgttgttgaagttactcgggtgatagggacggtgctgacagacgatcagggtggaaggcccacctagctgtcccgtcatgaagcgaggcttctgattgttcccctgaggaaagctgatctgagctgcctttctttttcggtccattttgttgcgttgctcttcctggtggatagccttgtccacaagcttctcaaagtcctcatagactccggagattagctggttggtcaattcatcgtcgagcccaaacaaaaacttctcctgcttctcagcatcggtgcgcacgtcctcaggagcgtagtgcgcgaggcggttgaactcgtgcaggtactctgtaaccgttctggttccttgttgcaatgcacggaactccctcttctgttgtgccataatcccttcaggaatctgtgccttcctaaagttttgacaaaactctacccaagtaaccttcgttgcatctggacgggtcaccacgtagttatcccaccaggcagaagcaggaccttgcaattgatgtgtagcaaaagcaaccttctctcggtcgttgcattgcaaaaggttcagcttcttctcaacaacacggagccagtcgttggcctccattgggttggtggtgcttgagaaagtgggtggctggatacgaagaaagtctaacagtttggacaggtgtgatggtggaggagcaaaccgctggttctgctgcacctgttgcaacacctgatggtgatgttgctgcatctgttgcatcatcattgtcatcatttgagtgaccgttgggttcccgagcggtggagatgaactgctgtcagatgcaccactgacatgagctccatcggtctgctcttcgctgcccctggcgtcgctggagtcacggggatcattccttgtcttcaccatctggacgaggataggtagaaataagagaaaggaagaaaacagatggctcggaagctaatctttgttataagtttaagggcaattatcttaatcttgattaaaacactgaaaaagaggcacgcaactcctaataaaggcagccataccactgacacatgatatcgactgctgactaacccacaagcaacaaacctaagcacggaaactagcaagcaaacaaaactaagaagacgataaagctaagggcggcgactctgaagcttggagcagcgcttgcgatcggagaataggtctgacatctaaagagtacagagggataggaaccaacacatgctcaaaaccaaattaaataaagcaacaaatgactcaagtaactcgccgagcatgatgatttttatgcatagaacatttttcatgaacccggataaagacactaatgcgactgactaaaccatagcttaatgcataaactagttgcatggaaaatgatgcgcataaaattgccccatcgaacatagacacgacctaatgcatatcacccgataaattcccaactgactgtcaaataaactccaaataaaatttttctaaaaccctagaccgagctaattttaaggatccgatccgaacgaacgaccaagatttttcccacaaaccaaagaggcaaaaccccaaatttttcccgaaacaaatccaagtgcaaaaagcatatgcagatgaaaaggtttaagagagctcttagggtttccatttggcttgtcctacggtcaaggtcggctctgataccaacttgtcacgcccagaaattcacggaccagaatttctaagctgaatgtgcattaaacccctgtccaggaccagccagggtacacaaacgacaattgttgacatacagatccacgtcttacaaaaatataaaagattacaaatgcggcggaaaaagataaaagcgagctaagcctgaagacttgactcctgcagtgggcgactccattccacaggcatccttgacggcagcgacgaaaccaacctcttcgagacatcttcaactgagaaggacttcaactctggtgtgggggaaaagagagcaagactgagtactacccactgtactcagcaagtcataccggaagaggaggtatgatgcaagatatatccaagggaggataaaggttcttttgcataaagtcggcatttcaaagcagtagttgaaaacagtaaaacagttgtagtaattaatccatattaaccaatcactgtccaacgttacaccacgttgcaacaggcccaaaccaccacctgaactaatcagttccaaaagctaactagggtgaaactaatcacggtgaatctggtcgaccgcccataaccgcgggcacggctattcgaatagttttactctgatcagaggtgtacaactgtacccacaagacacagccccacgacacgttcccgtgcgccgacatgccaccacgacataccggaaagaggtcgtgacaggacccttcgcataaccccctctaaccgatcgcaccacaccttagggttcgcccccgtccccagcaggcaacgggcagcccccctttcatgccgcggtgaatccggaagccgatcaaccggacaccccggccgacccaactccatcacgcccaccctcgcctgggtacgtcggctagagaaaagctacactacaagcccagccgttgcccacgctggcttgtggtaagtacgataaattcttccagggcatcccgcgaaccggtccttaaatgccatgggtgcgactagcaagaccatgcacccacagcccaccatgacgtgtattttaattaaccaacaccattacggtggcactaaatcaaagctatgccaataatcaagtctatgctttaatgtgatccccctttgtgcactagttgaactaagcatggctaagcatctcctaaaccaacatctagtcattttaatactcacgttatcaatggcataaggtaaacaatatatggctgagtaataggacccatcccacatgatattgtaaaacaatgcaatatttaatagaaatgcgggatatttgtaaattgggtacaatatgatcaattgtattgcatgacttgccttgctctcgcactgatgagaccacagcaacgtcttcgagaaaccacggatcgacgaaccgaccgaaatctacgcgacaaacaaagcacacaagcaaaacatgctataagactactgaaacagagaacaaagccatttttaatggattctacacatttttatgaatttactgagacttgaatggatttaatcggagctcggatgaattagatatgatttttagaagattctctatgtttttactattaaagaaaagccttaatcaatttattgcgcaatattgccccagggctgacgtcagcaaggggtggggcggcgccgacatgcgggccccactggacagaggcacaagagagagggagagggggcggctggcaggcgggacccaccgggcagcgtcacaagggggggggaaagcggcgaggcgcccggtcggtccggctcggcttcaagccggccggccggttatggtgagggcggcggcggcaagcggccaccgacggcggcggccggcgatgcaggcgacggcgcttcacggcgaagcgcatgcggggagcggcggcgcgcgcgagaggaagagaaggggagggagttctcaccggggttcggccggcgcgggaggatacgacggcaaacggcgacggtgagcgaccggagggcgacggtgaacggcggccgagctccgggacaccctaagagaggaagtgagagaggttagatggagagaaggtgtccacggcgagcgagagccatggccgacggcggcagctatggtggaagctcaccggagtgcgaggagatgcgagctccggcgatggaattggacgggagaacggcggacgaggtggacctcgggatggcggacgcggcggcgccgatggcggggtgcggcggcgaccctagcggctgctagaggcggccggagcggtggagatggcggcggcgggtgggtgcacggtgctagggcgatagggagctcgggggcggacggcgaaagagggaaaaaggtggagagaggcgcggtggtcggttatatagaggtggggaggccggacgtggccgggagcggcggttccgcggcgacgacgtggagaggtggaggaggagagagagggggagaggattcaaatcgaatcccgtccgtgcggacgcgcgcgcggacgggagagggcagggcgtggggcggcgacgtggggacgtgtgggcgcggagtggggcgcggatgcggaggaagcggcggcgtgggcggcggtttcggcggcggatggtggcggctgccggaggttagggacgaccgacaggtgggccccacctgtcggcgcccgggaggagaggggaggtgggatggacttcggggaggggaggtgaagcgggccggcgctggagggaatgggccgggccaaaaaaaaggaaaaaggagggaaaagaaaagataaaaaggaaaaaggattttcccagggatttatatgttgcacatgctcatttttaattggttaaaattatttccaatgctctgaaaattccgctaaaaatcctgttagcgtattttgacatgtagaatccaagaaaaattccacatgccgattccgattattatttgcatttattaattagggattcatctctaggttaaattaaacaatttcttcggacgatttattttatgaatttagagcaagggaggggaacttcagggcgagatatccatatcactccttgcatttttaacaaaaaagtaatcttgacgaaagataatctcataaagagaaattggagggaaaataatcaatgttgttttttaatacacaagagaccatccaacatcttttctttgactgtcatgttgcacgttttgcttggcgatgtgtctttttgccttcaacattcccccttcccacaatataaaagatatttttgttactggctaaggggagtgcttagacaaaaaaaaatgattttgtttggagctagtgctttatgttggtcaatttggtgttgccgtaatgatatagtttttaaccataaaaaaatgcctaacatcatgcaggttatcttcatatgtttcaattggctccactcttggtgtatgatgctttcacaagaacaacaggatactatgcgcaatggtgctacacgcttggaattagcagtcaagtaacttttattccagtttggatggcgtagtacctatagaatttcgtgataaaatctacgtgattttgaaaaaaatattattttagtagatcatatcatcggcagaagttgggggtttgtcccatctcgctttttttaacttttctgtgcacgtctgaattttttggctgtgtgcctacgggcagaggccggagatgtaacccatttccattatctaaaaaattgttactttcattaatcatttactaggcagtgccgattgtttggatgatatgatgctttgggtttattattgctcttattatatttaccactatctacagttaaacaaaaaaaggtgctctattttagtttgccactctacaggctctatgtttcttacatattgattttctgctctcctttttttttaaaaaaaaagaattattcagtgtggtagttttatctgtcattttacacaaagaagtgataaattctacctgttatttcagtcttctatgaaatgttgtgctgaagatatttctgtttacccaaaacaccaatctctctaggaacacgaaggtgtttgccttttgctaatgtcttattacctccgttttttaaatagatgacgccgttgactttttctcacatgtttgactattcgtcttattaaaaaaaattatgtaattataatttattttattatgagttgttttattatttatagtactttaagtgtgatttatatgtatacagtgtgatttatatcttatacatttgtataaaatttttgaataagacaaatagtcaaacatgtaagaaaaagtcaacggcatcatctattaaaaaacatagagagtattacagtgcgtagtgacagtcaatattacctatgtttacatgacctctaactgctgccctgtttttaaccttttacccctatcatgctgcaattccaggagttgtgccggtgttagctatgctttctctattatatacatcaggctaatttatcatgtcattctactcagaagaatgtacataacaaatagcaaatagactcgaaaataatatatcatgaaaagaatggtcatgtttgtgtgcattgcaaaaggaccaaggcaaaataatagtgtactgtactcagtttcttccagttatataataatcctgaccgtgttacattttgaatttttacccaactttcaattatcatataagcttcagtgtctaccgtcactgtttgagtatagaacaaaatgactgacatctaaaaccaccataccatgttcatctgtgtcacaactttggtttgtttttcgggaatcagctacttcacctttgaatcttgcaaacttacgtaccaagtcctttaatttgtacaccatgaacaaaagttccagatcatataaattcgactaacacagtggcacttcatccgcggcaacgcgcggggtcctagctagttcttttggggttttaaggtagagaggacaaaagatatgatgtcttctaattttattttttctatgtgaattgacatgtgggtccgacacgcagacgctatcgtggcatgccatgttagtgcacggagcgggttagagcccgtttggatctgtatgacatccaaacaggttcaaagactcgaaaataaattttgagagttcatgtacctaaatgacacacatacacgcatgtattagataatattcaacggtatatatagccacacatacacgcatgtatatacctaaacatttaaaaaagtttcatacacatttgaattgggtatatactcaatttcaatcgtggtgcccgggcaccatggagcaccaaacaaacttggtatgacaacaatactttgactcaacatatacatcctcacaatctatagcataggttaaatttttattggcgcttgctccagacatcgacggcggcgcgccatggaggccgccaccgctgctcctccatatccatcaaagtccgagctcgccgctgcggaggtcgcgtcgtgcgcatgggggcggagtggcggccggatccgccaccgccttgcctcctgcccgcagttgcccatcacggccgcgcccgccgtcacccgtgcaagatccacgccagattcgtgcgcgtggggcgcggagcggcggccgcatgcgccacctcctcgcctcccacccgtagtcgcccgtcgccgcagcgctcgcagtcgtgccgcgccagatccgccgacgtcgtgcccaccgtcacgccagatcagcgatagaggtcgagccgctgcgtctccagcccgcagtcgtccgtcgtcgcctcggccgcaaccgtgctgtgccgaatccgccaacgttgcgcccgccgccgctcggctgtagaggtggagccgccgcacctcccgcccgccaacgccacgcccgcagccatgccgtgccgtgccggatccgcctcacgcccgccgatgccgcacccaccatggatgtgacaccatcaggcctggcgtgccaccgccgctcctccttgatgccggttctcctcgtccccgaaccgccgccgccgctgctcctcctcgtcgccaagccgtcaccggaaccgcctcgccgccacttctcatcccctaaccgccgtcgccgttcctcttctctccacgaggaaccacaatccgtcgctgattcgtaaaacgtggagagggagaggaaagagtgggtggacggtttctacaatgggaatccgtaatatatataccagataaactcagtacgtcgagttaaaaaataactcaatgtgcaaaacactgttggatcacaagacacacattgactatctcgctaacagttaaaaaataactcaatgtgtagcttgcaccagatcagttcgcgtggggtgtgcgtggggtggtgggtcgctgagttaaaaattaactatgtggtttgtttaaattgagtgtgcatgggtgtagtttgtgtgtgtcaggtgccatatagtacgtagcaccaagagcgccatatagtagctctctctctctctctaatatatatatatatatatatatatatatatatatatatatatatatatatatatatatatatatatatatatatatatatatatatatataaaagataaattaaagactgacacttgttgcgaatccaattattatagtgtgctatatatgttgtttaaatgagttgtgactttcactatttgcacatgcattataatgagatctagatatagaaatatgatttagtttgtttttatactaatttttagtgtgtgttatatttttttttacattttagagaggttttctagtgatagtctttcagagggggtcaatttttcatgaagaaatagaacaaatttactattgattttttttttttcctttttctcaaggggaagagttttttttcaaaaggggaagggagtatagtttagataaatacaaatatcttagagaaaattccatatatacccttaaaaactaactcaatcccttttacacccatgaaatttacccaatcctttatataacccatcaaattttaggggcatctaaggaagtaagcaaaattcaggggcatagaagggattagttaaaattgtaggggtataaaagggattttctcaatgtcttatattatgttgtagtgcttagatctaacgataacggtgttagtgttatatatttttttaatttataacaataaataaataattttatacaaaattagtttatatataatataaataataagaaaagaaatatgtagttaagttttatgtatatataaaagtaatacaataactaataatattatatttttttacaatattatataataataagataatttgttgttttataaatatattagttcatcgaacatcaattataaaatcctaaatatgctactgtactgtaccacatcgaccctcgcttatctcacctcaccggcgtcggcgtttgcagtgcgtcatatattatgtgatcattagggtctcatatccacccatgcatgatttatagagttactcattattcagttttatctcgagttgccacgactgcttgttcgcactctacctcagcacctactgtcaccggaccctttagttcgtcgaggtgttatttactgttcagcagcacgtaagctaactcgatcgccattattgcaaacgagatggagctgtacgcggacctggtccccctcaccgcggagaacttccgcgccctctacaccaagaagccgctccactacaaagggctttgtctttcacagcattatcccaggatacatgtggaagggcggcgacttcgtcaaggaccatggcaccggcggcgagttcatttgcggcgacaccttcccaatgagaatttcctacttccacacgaccgcccgtggttacccaacggctccgccgaaaacaacatctcacagttctttacccgcgtgccctggttcgatggcaactacgtcgtcttcggctgtatcatctccggcttccacaacctcaaggccatcgaagcggaggtggaggtcaagattgccaaccgtggcgaggtcgtcattgtcccgccgccgtcgttaactactaattaatctccgggtccacataccagtaattttgaagaatgtttttcagtatggatcgagtagctacttattggtactagttagtaatgtcttgtattgtggatggatgattcatcattgtctctcgctatacaagactaatacatcttttcttacttaatactactataatggatggaattactcactactcctctggtaatgtggagacggtgatgttttacttctttaatgatgatattattgtttatctttggcggtttgtatttgttgatgattataaatgtcaatatatattaatacatcatgatgattctcttcattttaattggcacctacttctaaaccggtgttattattttaatcattcatatattcgtgtagtgtatactagcaaagtagccgtgtgttgtatagattcaatcctatagtaagtctcatgttactacaaataacgctaatcacaaacatgtataatagtgggtgaagctgtaatatcgataaggtctatctccatcctaaaagcaaagtggacgatccaattgaattgcaaatgagtgaaatttctaacctaccaactttagcatggacaatcggctatcgtatggaccgagggattccatgatccgtgagtgattttggatgtcaaattacacatttacactgtcgatgttaccaacattcatagagtttttcaaatattaagtgtacataatttgtaaaaggtttctatttccattgctcaaccaaaaagcacaatttgcacccaaaacaaaagactcataatggcttccatatgaggtgaggtcagtggctgctctaccagcaggccaccggcaatcaaatgtcggattgagtgaaagtcattcgtgaccaatggctaagaacttcttatcaaaatcatctggtggaaataaacatgtttcagagaaaattatagtgggatgttattgcgagcccaaaaactctgctccagacaactcagatcaatggcaacacagggttccaactgccaaaccaagtcagctatttggaaacaatcaacgtgatctgattttgcaattaattctaaatgaagacctagaaagttaaaagccaaatcagatgaaaaggttgacgctctaccaattaatttaaactttcccctcagtcacaatttagacctccactttacaaagatcacacaagcctcaaaatctgaaagtttggtacaagttagccaatttcaggagtgataagcactaaaaaaaatccatagaacttgatgcaatttgcacgtttcactttaattgagactagtaatcgtgcacgtacaatgcatattttggaaaaacaaaattttggcacaaaatctactataatatgagcttacacaaaatatgaactctgtggtgattcaaataattagcattgttattatctcaaacatctatgcagattggataatctcggcatatctatcagccctccactaaaagcaagtttattaagcagaccctattttaccaacaaagaaaatatatatataattcacatgtactgctgaaatccatagttataagtgactaggaactatcgggaagaaatatattgtacatcatgaaagaacatgcactaaaatcgtgcaatattagccaaaacgtcatgaaagtactgctgtatttgtgttgaacatgcagtaaactgttggtaagaaggtagtaaggtagaatgtttttctgccagctaaggattttcgtttttttggtataaagacaacaaactatttaccagaggtgactcccttagtaaattgtccttcaaattcttaagggccctttaaatcacaggattgagaaaacgtaggaataggaaaaacgtaggattttgatagaaatgtaagtgtaaaatggaggattatacacttaattttggagagtcataattaagtaacgagaaaaaccaaaagcgcatgggataaaaaactggtgaaaaaaaattgacgaaaaaaccaaaagctctgggaggtgcgcggtgaaagatcggatttaaaaatctggaaaaaaaaccaatagcacgtgcgtagaaaaaaactctttcgcgtgaaaaaaaacaaactgacttttttttccttttttaccggagtcggacgatttttttttcacgacaagcttttttttatcgttttctgagtcggactttatttttcctttttttctacctttttagtcgatttttttactgacgacagaagcttttttaaatcctttttagtcggactttttttttcttttttaccgactatggaaatttcttgttcttttttaagtagagatagagattaaaactaaaaacataaaattaaaaccgattcaaatacggatgacgtaacaaagtaccggtaaaaacatttttaatttttataataatagagatagagatataaacccctgtaactttgcatattacaactatatccatagcagtgatctctcaccgtagatccgtgatcgtacggctgccggaggggggagaaagctggaactgcatggtgccacgtggtggggtttttttttttggacccgaatccttccagcactagatgataccccgcgcgttgctgcgggatatgtatgtataaaatatagttgcaaatatatcaacggaatcataatataataacaacaaaatgcatgattaatatattttaggaatgttatatgatagtatgaagcattgatatatcattctaggatgcgaacaaacagtgacactatggttgtaagtatagcagatataggttgtgttcggcagccctatttcagctgtgacacagccatattacacagtaatttgtgtcactgcaagcagctgtgtggctgcgttgcagcggctgcaacatgcagccgaacacaccaatagatggttttgttacagtagattgtaaatacatttttagtctagaataatagaattcctcgtcagcttgtttgctctctaaaagacactcatttctgatcatcttcttaaatccgatctatctgagtggattaattacccgattaaactgcatgcctcttttgagctctagccagtctctagagcaactgtacagaggacgtgacaagctcacagagtaaacaccatggcaagatgtcccaagaaatatgtgtctgcaaccgtagagaatagaggcaaccaatattttgacaaaataaagtaagattcaatgaaaatatttgaagggttcagttttatctcataccgcagaaccatacttgcacttttgttcaccaacacatagttgatttttcccctaacacgtatacatatttacttttagagcgaactaaacaaaaatgtgatgtttgatggatacttttagaaaaaaaaaggaagaatccaatttgtagcataattaaacagaagttaaggagaacaatatcaataaacttaccagatgatggttaatttggaaatctgatcataagaaggtgagtagatcgaattccaggcataactgcaaatggcaagcggtagaccaaatcagttgatatgctatttcatcctaaaatcacttggtggtattacggcgaggaaaatgagaaaacaattataggccagaaattatcagaaaccaccttcttaatagggatagggaatggagactggattcttttttttcttagatattgaaccgaatcctcataggataaatcgaatgaaatttggaacttgaagataaaaaacaggatataaaataatcttgtcattagggaggagaagcggacatgtagttagatcactcgagccagatatctgttttcaaaatcaacaacaggaagaatgagaaaaaaataaaagagaggaaagaactgcccgcttgcgagaggataacggtgacaggcgagagaccccaaacggtggcaccgactcacctgcatcttccgattttcgagagatgaatcagctatttgaagctctccaacacatgcaacatccattgtttgaggtgacgaggaggtgctggttaaaatagatttggttggattgaacgatcacgaagaactccaaacaagagaagctctgaataggattcccagcgcatataaggccctatttggcacagctccagctccagctccacccctcctggagctggagctcagccaaacagtttcagctccaccaaaactgggagtagagttgggtggagctctctcacaaaatgtactagagttgtggagctgggtttaggcagcttcacaactccactccagactcaactcctggagttatatttaggagttggagttgtaccaaacaggccctaagtgaataaagcccgggataagagattcagaggctcttcaatagagcccgggataagagattcagaggctcttcaatagcatgcgtcggtttctacttttgcatgcattaggccagtcacaatgggggtttcactggtgtgtcatgcacatttaataggggtaagactgaataaaaaatgattatttgcatgaaatggggatgagagagaaggaaagagtttcatcctggtgaaactcgtcagcgtcgtttccaagtcctcggtaacagagtgaaacccccgttgaggccgattcgtttcattcaccggatctcttgcgtccgcctccgccgtgcgacctccgcattctcccgcgccgcgccggattttgggtacaaatgatcccagcaacttgtatcaattaaatgctttgcttagtcttggaaacgtcaaagtgaaacccctccactgtggggattgtttcataaaagatttcatttgagagaagatggtataatattttgggtagccgtgcaatgacactagccattgtgactggccttacatgaagcaggtgatcagtcatgcatgtcaacgtgggtggggacagggaactcaatggatgggatatgtgtgggacgcagtcaatagtgcgtggtgaagccgagaaggcacatctgatcatccgttgattggccttgtgctggtaagaatccaacggactcaactgaagggatgaatcgatctaatctccgttcaactctgatctaacgctctaagataattcagatgacgtggcttcaccacaagacaggaaaatatgatagtggggatgattcgtatagttatataggattcggtattagagattatggcccaaccgacgtatcttcttttgctcttagttctctcccggtcccacatgtcagtttcccatggcccttctcctgaccttccccctcggaggcctttgtttgtctggaccggatccgggcccatgaggtggttgttccattgcaggccgaaaacgcagtttaaggcccctttgattcaaagaaaattcatagaaatttttagaggatttcattcctatagaatttttttctatatagcccttttaattaaaggaatagatcttatggaatcatatgaaattcctatggattgtctaatgccatgcaagttttggaggaattctaacatgaggtaaaacctcttggaaactttcctttgagtctttatctctcctctaattattgcgtttttcctgcggtccaatcaaacgaccatttctttatttttcctgtgttttgcaatcctctgttttacacttacattcctattaaaattctgcgttttttctattcctatgtttttacattcctgctattcaaaggggccctaaataggcctggagagaatttcccagcccaaaagtcccaaaccataggaagaacatatgcctcctcggctcctccttcgcgactccggcgacggcgacggcgacggcgacggcggcgcgcctcctcctcctcctcctcctttgtcaagatccggggccaaacttcccagaatcctgcacgatttcagagatttttggggctaagtagctacctatcagggatccctaccggaaaaacaggaagaacaagataattctgaagaaaattgcaagagaaagtagaggtcgccgcaagacacaggaaagctagggtttagatactttttctcttgatgattctcataactggatcgagacggcttataaggagttcgccgccgcgaggatacatgccagctcactaaccaaggctttaagccgacaaagacaatacaattagcaaaaaaaaacagtaattactggaagccacccgcatcgttggattttcattagcgaaacggtatcggctcatcagcgccgttcatttccgcaactcccctgtttctgttctgttgtcaccacacattcagaatgttcagcaatttcagagtagcaggatctgacaagactcccccctgaaagacccatgccctcatggggtgaaattaggaaacactttagtgatgaaggatgcatcttcccaggtggcagcctcagatggaagattttcccattgaattttccactgaacaacaggggcgttgttgcgaggaatcaatcgtcgttccaacacagcaacaggggcagtgagtatattaccataagaatcaattaggggcagtccaggttcagggatagctttgcgtcctgcatggcgcttcaattggctgacatgaaacacgggatggatttgagaatgttatggcaatagtaatttgtaagcgactgacccaattttttcaatcacacggaatggcccataatagcgagagtgtaatttgagagaggaatgtagacccaaagaattgtggcgatatggttgcatcttgaggtatgccatattacccacttctagagttcgttcagtgcggttagcatcagcatagtgcttcatccgagcttgtgccttgtctaggctagctttgactgtgtctaataaggcatcttttgcttgctggcgatttctgaaaccttctaacaaagtggatggtagtagggcttcccctatcattggaggtttctggccatagagagcctgatatggtgtcatattgagcgaagtgtggaaattggtgttgtaccaccattcagcttgatcaagtaatgagctccactttctgggtttggtgaaggtaagacagcgcaagtaagtctccaagcattggtttactcgctccgattggccatcagtttgagggtggtatgcactgctaaagtttaacttgactccagcagcattgaagacttgtttccaagtgttggaagtaaagaggcgatctctatcactaataataacagttggtaatccatgtaatctgtaaaagtgtgtcttgaagagatcaacaatatgttcagaagtgaaggggtgacttaaggcaatgaaatgggcatattttgtcaatctatcgacaatgacccagattacatccttgttgtcagattttggtaagccctctatgaaatccatagtaatatgtgtccatgctagctcaggaataggcaagggttgaaggagacctgggatgtgaacatgttcagtcttgttcttttgacacacaggacattctttaatgaagttaatcacagctgatttcattcctggccaatagaaaatcaatttcaaacggtgataagtgcctctttcaccagaatggccacccaaaggagaagcatgaaaggtctccattaactgatgctgcagaacaagatctttgccaatgtataatctgtccttataacgaagtaagcctccttgtaatgaaaaagggggttgagcttgggcattcacactgagtttggtaaggagaagtttacacttgtcatcgaggttgtagctggccagtacttgtgttatccattcaggaacaacaacattgagtgcctgaatgttgtgaggtggggccattcgagagagagcatctgctgccttgttttccttaccttttctgtattctattttgtaatcaaaactcattaatttaatgagtaatttgtgctgaatgccatctgtgatacgttgttcattgatatatttgaggcttgcttgatcagttcgaattaagagagaagaacccaaaaagtaatgtttccatttcttcaatgcttctaatatggctaaagcttctttgtcatatgtggaaaaggcagcagctttgattcccagagacttgctgaagtaggctaaaggctgacctccttgcataagaacagctccaatgccatacccacttgcatcagtttccaacacaaagggttgagtaaaatctgggagagctaaaactggggcctgcgaaagtttaagtttgagagcttcaaaggcttgttgctgatcaggcccccattggaactcattcttcttcaggacattaaacatgggtcgacaaataatgccaaagtgtttgataaaacggcgataatagccagccagacccagaaaacccctcaactgtgtaaccgtagtaggaataggccagttttgaactgctgctattttttcaggatctgtagccaccccttgtgcagagataatatagcccaggtattccacatgttgttgtccaaaaacacacttggatggtttggcaaacaagttgttgtctcgaagtaactgcagcacgagttgcaaatggagagcatggtcgtccaacgttcgactgaatattagaatgtcatcaaaaaatactaggacaaatttgcgcaagtatttggccaagattttgttcataagagcttggaaggtggctggtgcatttgttaatccgaagggcatgacgatgtactcaaaatgaccaagatgagtgctaaaagcagttttataaatatctgaaggatgcatgcgaatttgatggtatcctgaccttaagtcaatcttggaaaaataggcagcaccatgtagttcatcaagcaagtcctcaatcacaggaatagggtatttgttcttaattgtttgagcattcagttgacgatagtcaatacataagcgccaagaaccatccttctttttgacaagtattgctggggaagaaaaaggactcacactgggtctaatggtgttagaagaaagcaactgttggaccagatcttcaagtgcattcttcttatgatgtggtaaccgataaggtcgcacattgacaggtttagcatcagaaagcaatggaatagtatggtcacagtctctggatgggggtaaatcttgaggctcagcaaagacatctgcaaaatctgccaagaccttggaaattacaggagagtgagtggaactaagttctgcagcagcacatgtgagtggctgaaccatgaaaagtgctccaacagccccttgtgatattaacttggataattggtgagtgtcaaccaagagtttgccatgagagagagagacatctgacagggtaacttcttgggtaccattaagaagtagagatagctgcctgtttttcaaatcaagggagagggggctgtgttggagaatccagtcacaaccaaagattacatcataacctttaatgtccagtactttgaaagtagatacaaactgaacaccttggatctcatatggctgatcaacacattgagcttcagtaaataaggtacccccattagctatggtgactggaattggttcatgattagaaatgtccaggtgtgctttgtggaccactttaggagacaagaaggtggttgtgctgccactgtctatgagccttgtgctaagcaagcctggaaggggctggctgcctcgccgtcgccgccgcgatgagccaccggaggcgatctaatgccaccggcccgccgcctcctgagggcgtcggcgactcatccaccgcacaagcctcgtcgacggagaaggagaggccggatccgccgtccgtgttgggatcggagcgaagggtgcttgcgctggcgctggccttccgcgcggcgaacgcgctgctggtgcgcacctacttcaaccccgacgagcactggcagtgcctcgaggtcgcccaccgcatcgtcttcgggtaaaactcgccgccgccgccgccgccgccgccgctggctgttgtgcgccggcttttagtctgcttgtaagtcgcttgaaatcgaaatagaatccagctgacactctcaaagggagtgggatacttgaactgccgcattttctgttcactgcaggtatgaccaccttacttgggagtggaagaggggtctccgaagttacctccatccgttggtctttgctgcgctttacaagattctggccctgctccacttggataccccatggtttatggtaattactctagcaaatcatgccaaaaactcattaggtatttctctgggcgaagattgcaagtgataattctggtcaatgtcatgtggtgcttcaactttctattaacacaagttcagttatatgaaaggggatcacaagtgctcagtatcaacaatttctcctgtagctagattctttgttgggatagcttacaaatgggttcttaattctaaccatgcagaatgtgtaccctgttctatgttcagtctcaattctaagcaaataaacctatatgttaatcagatatcactccactctgcatggccttattttttccacgcactgagaagcaacattttcttattatttctttgttttcccccacaggttatggctccacgtcttctacaagcagtctttgcatcttttgggcatctctacttatataaactttcgaaactcattttcaataatcatgttgcccagtgggccgtatccttgagctcatttctgtatatacgattttctttttcatgaataaaggaagtccattttcctggtgaatggtgaccttaacaactcatttccagttattttcgcagctggttaactggttcatgctcttctgtatcacgtgtactctctcaaacagcatggagacagttttgactattactggactttactattggtttgttgcaatagagtcttcgaaaggaactttggttgttccaaggcagaagcctgctagcaagcaaagccctccatcaagaaaaatggctctactcatagctgccttagcttgtgctattcggccaacaagtgccataacatggctatatgttggtcttttggattttattcagacgaaatcgaaatcccggtttctctttctcgaggttattccactagggtaagaaattattttaaaatttgcatcgaacttatggtttcagtatatttctttcttggatttgtgcactggatgtgtataaattggatgaatttaggatgttgtttatggtaaattttcataatgtcttttctctgttatttcttgaatttttgcatcataatgctgatggattttgtcttttatttcttaattttttttgtatcgcatatatattatgctgatgtatatataggatgtttcccatgggaagaatgctcgctggtcggtcttctgaaaaaaacaaactgaacatatggaagtcattcacattgttcaggagggatcggcattactgtccaccatgctaaatggtagcaaaacaaaggttgcatggtcgattactatatagttgtgggtaagataagttatgcacaaacaccagctttagggcatgtgggctagattgttacaatcctatgtgcgatatgcaattgtctgtcgtgtcatcagcattatgtatatcatttctgagatcagatctcttgaccccttcagtttcttttgttaaaattgcgatcgccttattgtccaaaaaaatgatgatttaaggattgcttttcttgtaaggtcatttgttctctttgtcaaaattgaggaatacctctataaaccttatgccttttaatttttctgcagggtctttgtccttgctgtgacaacatttcttgattgttggatgtatggttcccaggtcatagtgccgccacttaattttttgaaatttaatctcttctcttcgggaggcgactactatggaacacatgtgttccattggtacttcagccaaggttttccatcgatgatttggactttcttaccgttttcaatttctggaattatgaagtctcgagaatggaggcttgcaggtcttattgtctgggtattagcagtttatagcatacttggacataaagaattcaggtacttatctcttctcacaagtttgtaatgttcaatctcttctcactacacaagtgcacatgccctgatataaatggatcgaatacaacaggtttgttctcccggtgcttcctttgatgtttatgttctcaggatacaacttagctgcaatggcacaattcaagggaaaaggtcgcagtgagaaaggccacctttcaaggtttcagctttctgtcattctgcttatcttaacaaatgttccaatggctttatatatgtccttgtaccatcaggtaagttctacttttaagtaaacatattctttatctatgttgttccttaggtaaattttgttgttttctatttgcgcctagttagcttttcttttcaaaattccttaactgctcttatgtgtacattttcactttgtcagagaggaactgaagatgttatgttttacctgtcacgagaagcccaagatggaagagtaaagagtgtcctcttccttatgccttgccattcaacaccttattactctacattacattacaacctgcctatgcgctttttggactgtactcctaggtgattatgccttcacttttttctagtgcagtagatatagcatttcattttactatgttgtacctgatttagccaattatcctgacttagcgtgcttgttaccagcgaaaaacaaagggaccttggatgagtcagatcgtttcctcatgaacccatcagattttgtgggcaaggtttttggaaatttatcttctttcagtcacattgtattatttgagtctgaagaaaggcatctcaagttgcttctgcacaattcttttagagaggtaaaaccatgttgaatcttaaaatctcttcttccctcagtttaataggcatatgcatataccttttttctgtttggtagtttagatttcccttttgtaagaccttgtcagtttgttttaggctttctttcgaaagccgggtaatgaagtttacctgcagtctaaaaaaaatgcatatacttagtagtctttatttatatgatgttttagaaacttgtgcttaaacttttcttactcaatgccttgtaaattggtcatgttgaaatttttatcattagatttgcaatataattttgcactagcatatgcatataaattgatattgaagtcagacattgcagctgatgtccaaatggaactgattacttctaaaaagaaaaaaaaatcaaaggtattgttcaagttggttcataaagaaatgtctaaaacacaaaggatgggccacatttttaagtttgtgccccccccccttctctctctcgcgtggatgcacgcctcctctcatgttgtagtattggctatgcacgatcagatgactatgataatgacatattttgcggtaacattgtgggtgtaccaaccctagtgtcctaatatcaagaactacgtgtcctagaaaccagtataattaaattcccttttgtgagtagtcctcctagcaagaattgccatcagtttgtaaggtgagcatctgacacaagctctgcattgcttgcaatcgatggcaaaataaaatcaggttattgtttgttgcactcaggtagttaatagttttattgtagttacaatttgtgaactagctgtcttaaaacatgatggataggttgcattacattgcatgattggctgtgtatgacgtgataattaatatattatctcttgtattcttaatctttcctgtccattaacatcatgacatgtgtcctggttggcaggctaggagattttttcactcccacttcaaggttgatagagaccttcagtcatcagttgtagtttattcacggatgaatgtattgtgattgctgtggcagaaaaggcctgttacttcgttagtctactatcttgtctaacaatttctaatcatgttttggccttctttaatttgtcattcaataaatgatctgtaacttgggcctttattttgagagagagaatttttcccatcctttatgatgcgattctatgtcgatgtattggcggcaacttccatggtgaaagtaggacaaaccacctggtaaaaaacaaagaaggtaggacagaccattccatggcacattgttgttgctgacatactgaacctcataaaatcatgtcacatataagttttcattgatttcctgcagtttttattcttgaacacaaatatttttacaagatatttatgtcaggagatgctaatcgaaactctgctaaaaccatttattgatacttgcatactcatcatctaccagtttctatatctagcgccatcaagcttccgtgtcgtccagtggtagaagggtcatactgtgatgaattttcaagcaaacatacagtttcttcattagcaccctcaatcaattgctcacgccaggtgcttcttattgcttttaacctttcagctacttctgtcattaatggccgttcttccccctttgtactcaagcagcattttgccagttgagcaacatcttggaacagctctgttccaacacctaatatgttcctgtccaagatggactcaagtctgttctctttcagtgccagaaggaaggatgatgcaaggcttttcttttcttcagtattttcagaataaattgcagtctttcctgttattagttctagaagcacaactccaaagctataaacatcacttttctgtgttagctggcgctcttgtaagtattctgggtctaggtagcctagagtcccctgtaccattgtcataaactgtatttcatcttttggaagcatccttgatgctccaaagtcagtcacttttgttatgtagttgtcacctaggagaatgttgggagatttgacatcaccatgaactattggaggggatgctgatgaatgtagatatgctagtgcttctgcagattcctgagcaatccgtagacgagcatccagtgaaatggaggttgttctgtatttaccatgtatatgctcgaacaaagtgccatttgggatgaattcatagaccagcattggaacttccacttctaagcaacaacctagaagccttaccacattcctgtggttgatctgtgaaagtataatcatctcttgcacaaattcatctttctgaaccatattcataatctttgagcgctttatggctactattctgttgtctttgaggatccccttgtatacagtgccatgaccgcctcttcctagttctttgcttgagtcaaaattgtctgttgcattctctagttcttcttttgtgaatattctcacagtatcaacttgctttgaccggatttgctcatacagcagcatacccccattttgttgaaagaacctttctttttctttcatcagctttcttttctggcattcgatcagtagtgcaaaagtgcaactaagcagtataatagcgcataccgaaatgcctgtgaagaaaaacctttttttagttaccagaagtcgaggagaaattttctgtgggtatttattgctgaattagcattataatactgtatccttgtgtaagattgctatataattgaacctatggctggagataattctcctataatatttctcaagttagttacagatagtgaaacattttgcaatagaatgcttactgtaatatatgtattttgcctatctgtctggcttctagctaaggggaatgaagtagacaattctaccaagcgggaaatgtcaggagtctactgcacagtaccttttatatgttattccttcatgaaatattaggactttggagtattgggaattacctataaacgtttttgttagtctagctctttctgaagctgttattggattgcagggctctctctttggatctgtactttgagtcccaggcccgcagtagcaatggtagcccccaattgtgttgtcgcagattccatggcagtactgacccggagattcgcactcgttgatatctgttgacgccatggaaaagtagcaaaacaactgaagatcaatgcacagatggacataaggtgaacttgaaaaatagaagtgaattgcagtgagttggttaccttggcaccctccttccaggtacgggttgcctgcaaacccattgttgcaggcacagagatacccggtagcatttggtgagttgatgcagctgctgttcgtgctaacacaggcatatgatgtcctgttcttgggcgcttgggcacatgattctcttccagcaacccaatcaagcacagtgggaacccctttgtacttgtctgtgaacttgtgaccttctaggtaatcaggctcaaacctgaaccagtcttgctcggcaacgaaggcataactgcatgggttgaagctgttcacctcagaattgttgaacctgctgtcgaatgtcacgtttaaggaggtgagatttggtgcaatagatgtctggcaacagcccatgccggagcactggccgctactgtccacactctgcttgtcggggcacatcgagaagcacccagccccaacgttctgttcttcctcgttgtagccccccaggaatgcaagggtattgcatccaaccaccgttaacttgttagccctgctggataatgtgaaaaaaggagcagtagatgttgatacccaaccatctgttgaagtgccatctgtgttgttggagcacttgtcggcgatgaaggtgctgacttgagcctgccctccaatcagattgaggctgtagatctccatgttgctgcttgagttatgcatgtaggtgcggttctcctcgcatgaaacgtcgaacccatcagtgtagaagcaaccagcaccgatgccgaaggggtagggaatggtgaggttgccgcatgttcctctgcatctaggcttagccatcctggatgctgcactgaagctgatggttgctagcagtagggtggttgcaaggatcatccatggtactactccagtcatctctctgtatgtcttgtattatgattctcctataggttctagttctcttctaactgagctatgcttatataatgaagcaagcctctggaggtccagtccttagaccctatttagatgggactaaaagttttaaatccctatcacatcagatgtttagacactaattataaatattaaacgtaggctattaataaaaatccatccataatcttggactaattcgcgagacgaatctattgagcctaattaatccatgattagcctatgtgatgctacaataaacatactctaattataaattaattaggcttaaaaaatttatctcgcaaattagctttcatttatgtaattagttttgtaagtagtttatatttaatactctaaattagtgtctaaatattaagactaaaattaagttcatggatccaaacaccaccctactggtgcttttaatatggacgtatggtgctattgcttgattgcatccattcagagcagactcggtcagaacaactagtggtttccaggtacattaattattaatatctcaaattatttcctggcaaaaagagaagaagagaaaagctaaaattattgtgggccgacctattcacttcattgccacattgatattactaaattttggtcggaaaacaaattaaatataatattaccaattccatcatacaaaaatttggtagttcttgatttttgctcttagaaaaacactaccaaattttggataggcatcaaactaaatacatttaacgctaccaaaatttagaaatgtcaaaacttatccaaattttgaattgccaaaattttgtaagattgaaattggcaacacatgattttccctgtctgtcacgtaccattggtcaatttgcatgttttgccccgtcggctacaaggacggcttctatagtatcgtttacttcgtcaactttaatcggttaacccgttccgtttggtctatctatagtatcgtttacttcatcaactttagttggtcaacccgttccatttagtctatcgttagcatatttttcgaactgctaaagagtattgtgaaaaaaatagtgtaggagtttgttaaaaaatcaaataaatctatttttcaaatttataacaattaatagtattcaattaattgtgctaatgactccactctaacctcaaggctcaagccttaaatttgtgacttgccatgtctactccctgagaatcacatttacagaactgaatgttatgaaatgaagatcatgcgaagccaatacgccgcatcgatgttatgaaatgatcacacacaatactagtactggcaaatctcaaacagaaaagccaccgagatacagcagtactgcagtatatcagtgtgcctccctaacgcttgggccctttttcagtttctgaaacaccgaaactattttactaccagttttctacagaaaaatatagagagagctgtttaccgtaaaaatcacgtgttgggtcaagccattgagcttgagctgcgggtgcgaaacaggatggtgagacgagcagtcttatgttttcacttatccttattggtcaaaatttaaattttcaaccttaaacttagagttgattataagattttcaccataatttatttttcaacatttgtatttagctcgttaagaaaagtatataaaaattttattcataaattatttttaatttgcaaatatatcgttccgttctttcgtccaatatgctaaacagggccggagagatttgccggacccaatggtatccatgttgccttcgattgggtcaagtcatgggaagaagaatccaaaagagggagactgatgaccattggcatcgatgattaaagagagggctcgtactaagtgctagtgatagacattgacgccaattgatagagcaacttttgaccacaagttgatcccgcttgccgattgtaaagaaattgagcatagtgtgctctctctgtcctataagtacaacctaatataaatgtgatcacatctatattatattgtatttatattagagcggaaggagtactccctccattccattttaaacataaccatgagtttccgtgtcctagcgatcaaggtgctaactcgagcctacccttcaagcagactgatgttgtagatctccactcggcttgtggagttatgcataaaagtgcggttatactcacatgaaacgtcgaaaccttctttgtagaagcaaccagtatcaatgccgaacgggtagggacgagctaacaataatgctgaactggtcttgagattcatgctatttccacgcgttgcgtgatgctatttggcatctacgcggatacaaacaaactgaattttggaagactcgtagacttgcgttttgccgtgaagtacttgaaggcggatcgctattgaaggacgacggcaagacgcgcttcgcgaaggttacgagtcaattttcaggactttagtactgtaggtctaattgggtcaagtcgttgcctttgtgtgatatctttcgtccgaaagagcgtcgttgttttacttatgtttataggtaggatttaaattttaaaatttaattttaaagttgacttagggagtttttttctaatttattttacaccatttgcttttgaatatccgaaaacatatatatagaagttttatatacaaattaagttttagttgctaataagataaacataagagaatgctatgaatgtaacatctcctatcaggctatcactccaaaaataatgaacaacaaattgtagatagcttgtttgtgcataatccttttgttttgtttacggtgaatctggatttaaaattactaaaacaatgtgatcatcatatgcaggcttcggccattcggagcgacccaactttcgttgacgggccgacgtcgctggctgaaggtgaatggaacagcccatgttccattatattggcccagaacggaatcgtaactattggttcctaatatcggcccaatcaattgcgttggttatgaatggcccatggaagcccactattgctgctcccgtgctccctataaatagctagggttttacgccacttcccccatctccgccgccgccgccccactctccaaccctagccgagaggagcagaccaagcaatggtaaccttcgcgccgccgccgcctcattgcttcttcctcgtctactcctagctctaacatggtgatcttcttgtggctcgcaggggaagggtacgggcagcttcggcaagcgccggaacaagacgcacacgctctgcgtccgctgcggccgccgcagcttccacctccagaagagcacctgctcctcctgcggctaccccgccgcccgcatccgcaagtgtaagcctcctctagatttgtacatgtgcttctcggtttcatgtagatttgatgattatattgcgcctagattaaccaagtaatgtttagaaactggggtgttagtggttcatcttttcttgattagctgagatgcgttgtcctgcacgaaccttctctttgtagaacctgatgttttgatggaaatgatgaagaaaacattggtccgtgtttctgataacccgtgactgatagccatgttttctaaactgatccctgtcatgtttattgtctcggacattatccaatctcgttctatctgtggtcctgagaactgatttacctgctcagctgcgttgatcttaaccgaataaaaattaatgtgttgtttgtacatatgttttttttccacaaatgattataagctaaaatgctttcttggaaaacataaggatgaccagtttcatatgaaaacttaattctgtttgtgaggttcaagcgatgaggttttaactgcaacaatatgatgggagctttgctcctgtgattcctatgtatttaagtctctgatgatccttccaacatattttccctttgaaaggctaatgaaaactgtcagtattaacgtacaaaattcaagcactgatagttctcatgtcgtgattgatcacaaatatatttttttctttgcatttgattttccaaatggttttgctgtcctacaaaaaaaagcaattaggaatcatgaaaacgttcgcatgtcagacttcagagatgccatggcattaatgagaagatgttttcattttctgagcttatattttattctggctatcacatttgattagatgatttgtgcagtgattatttagatttttgaacatttgtaacactttgaagttttgtaccttcattgtgtttattatatatttctgtgttgcctgcttctgttgtgaggcaggctcaagtgatgagtgaaaaactgcaacaatatgatgggagctatactcctgtgattcctaagtatttaagtctctgatgtacccaatgcacacagttttttctataagtactcaattttcccttgtcttatgttttctttcgactgatcctctaacctgagattttatttattctgtttcttttcttttctcagatcaggcaattttattatatttgctctttttcaaccttcagttcaaacatatggcaattctatttgtcactctgttcaccgttatgtctacctgctcctgctgctgccttgtttaatgtatggtagcagtacttagttgagttgtttggtttgtaataatgtaaccatttaaattcgtatcattgcacatctgtttcctcgcattgttcatttaatgccaaatacacattaaatgaaaacatacctgatttgagttatattgtttgtggttagcctttaaatctctagttagattctgtggttgaatttctttttttttggatttgcttagttttaatttctgcgatgtcatttcagacaactggagcgtgaaggccattaggcgcaagaccacaggaactggaaggatgaggtacatgcgacatgtgcctaggaggttcaagagcaacttcagagaaggtgcctggaacttttcttatgttttaaatctcatgggaaatgttaattgcgttcaaaatagtaaagctgtttggattcattatgttccttttgctctatcgattcaggtactgaggctaccccaaggaagagagctgccgcagccaactagatcctgttttgctgtcaaagcagctatgaaactagaatttaagaacttttgcctggattgagccatctttcctatagtatgatgtacttatcttgttttatttgttatgatgctttaaaacttgacctctgaaatttcagtcagttgaacctctcgtatttttgtttcatacaatgttcatgattctcttagcgtccatggtaacggtggtgttttattttgttccgtggtgtctccgcttgtttcgtgctgccattcaaccagttttgggaaatgcttctgtttggtcgaaatgagctgccaccggggttcacaattgcgatcagtttgaaagtcatttatttatttatttttgttaaaagccgacgtttactggttttcatctcgaaacggtatgtaaaacctggctaccatcctcaatttgcacttgaactggacccaattgtactagttttataatgtaatttacctaataaagttgctttggtaagtgtcgggttcattagttgaatgtgtattcggaagtacttagaacttacctaaggactcaactacatctagcatgtgaaatacagttatcagctaaaactgacttggagtaaaatacagtttggctgaagctaaaaaagtcatacgataaactgttttcacatatgtggaaggttgttcagcgtgacaacatttcggaatcttcgagcaaacaaatgcatatgtttgttacaatcaagttagtcgaaggaaacatgaaacagaggtcgaaggcgcataaaatgcaagcaatttggttaggcacgcagcttcagccaggctttgcttcactgctcagtcgagtgatatattcagatggatggatgcctgtctggacggcggatccatcactggctaccggtggtggtagtgccggcaccggccaccgcgttctgtcttctcacaagaaaagattaggcactcccctgattgatggttactactagcacttagcacacggcccacgggcctagcctgtcactgccaagaaattcggtctataaaccaatgggccgtgttgtagtgtactaggcggcgcggtgctgctgctgctagtagtgtagatccagatgaaaaacaatcttcttgccgcgcgctgttatatcctgattcgatttgtcaggatttgggtggcgatctagctagctattcatggccatcaagctgcttaagttagatggcccagaaataggagctgcaatattggataggagaatgcatattcacatggaaagcttgattttaatcttgttcatctttctcattctgattatttctactcggataaataacaagagtaattaaccgagtgggtttataattattcacctgctttcaattgcttacattaagctacatgatctatgtctaatccttacagaaaatggttgttggtttgttacaagctcaaaattcttacaatttttttagaataatctacatacatgaacaaatcattaacatgcaccgaagaaaaaaaaaaggaagaaagaaaatggacacagctaagcgtagtcggagtccggcgtcgtggtgaacaccggcttgtccttgtccaccaccgccgccaccgccggcggcgccggagtgggggctttggcgctggcgctgccggtggagctgccgctcttgcggcgcggcttggcctcgccgagcatggtgatgacgtcgcgcatggacggcctgtcgcgcggcaacctggcggtgcagagcacggcgatgcggagcaccagcagcatctcctccctgacgtgcgggcagccggcgccgacgagctggccgtcgaggtggtcctccaccgtgttgctccggatcttgttgcgcacccagccgacgatgtcctgcccctcgccgaacgccgcctccaccgccctcctcccggtgatgagctccatcagcaccacgccgtagctgtacgtgtcgctcttctggtccaccttcatcgtgtacccgtactccggcgcgatgtacccgtacgacccggccaccaccgacaccgactcgccggcgcgccccagcgcacgcgccagcccgaagtcggcgatgcgcgcctccatgttggcgtcgaggaggatgttgttggacttgatgtcgcggtggatcaccggagggtggcagtcgtggtggaggtaggcgagcccctgcgccacgccggcggccacgtcgtagcgcgacacccagtccaccagcgtgcgccgctccggcggcccgtgcagcgcctcccataggctgccattgggcatgaactcgtacagcatcatggcgtcggcctcgttgtgcatgtagccgaggaggcgcacgatgttccggtgccggagccggccgaggaggcccacctccttcagcacctccgccgtcagctccggcgcggcggcggcggcctcggcggcggcggctggtcgccatagcttcttcacggcgatcacggcgcgcgcgcgggggagctcggccttgtagacgacgccggtggcgcccatgcccaccacgttcgcctccttcacgcacgcgagcacctcggcgcacgtgaaccccagccgctggaacgccgtcagtcgccacggccacgcccccgactcgccgccgaggttctcgtcgtcgcagcaacccgcgccgtccacgtaccaccgccggtacgcgtagtgcccgccgaacagcgccgcgaacgcggccacgacggcgaccatgccgaccagccaccccaccgcgatgtgcctgagccgggcgctgccgcgagagcgcggcccggcggcggtggaacggctgccggagcacggcgggagcacgccgccgcacagcccggcattgccggccagctcgtcggggttgatcgagcgcagcacgccgttgcccggcacgggcccggttaggttgttgtacgccaggttgagcgtctcgagcgccggcgagctcccgaaattctccggtatgccgccggtgagaacgttgctcgatagatcaagaatggcgagcgccggcatgttggcgagcgagcgaggtatctcgccggcgagcttgttccgccgcaggttgagcttgaccagcctctggcacgaggccaggctggacgggatcgcgccggcgagccggttgttggacaggtccagcgcggcgagcgccgggcagtcctggaactggtcggggagctcgccggagatcatgttgtccgacgcgaggaagctctgcaaggtcgggatggtgaagaggctcgaggggatggagtactggaggtggttgcgcgacacgtcgatgaacgacagcgacgccgacgacgcgaggtcgccggggatctcgccggataggtcgttgccggcgagctcgagccgctgcagcagcggcagcttcccgaacccgacggggatcgtgccgttgagccggttgccgtgcacgcgcacccgcaccagcgacgcgcacgacgcgagcccggccgggatgccgccggtgaagccgttgttgaacatgatcagcttgatgagcgccttgccgtcgcagatcccggccgggatgccgccggtgaatccgttcgacgacacgtccacccactgcagcggcgagctccggccgagcgacgccgggagcgaccccgtcaacgagttgttccacagctcgagcacctccagcttcggcatgtctccgatggccgccggcacgacgccgtcgaggtggttgcacatgaggttgagcagccggaggtggctcagctgcgccacctcgtcgggtatcgcgccggtgaacgcgttgtcggagaggtcgaggaagaccagcgtcgagatgttgccgagctccggtggtatcttgccctcgaggttgttcttgtagaggtagagggaggtgagcgccggaagcttccctagctccggcgggatgggcccgtcgaggttgccgacggcgaggtcgaggtactggagattggcgaggttaccgagctccggcgggatgccaccctcgagctcattgtacccaatgatgaggctctcgagggactccatctcgccgatctccggcgggatcttgccggtgatgttgttgccggagagtcccaagaacttgagcttggtgaggctccggtaagccgcggggatggcgccgccgaagaagctcccacgcatgtcgatggtctccagggacgtggcattggcgaggtcctcggggaggggaccggcgaagttgttgccggaggcgttgacggcgacgaggtcagcgcagccgccgaggccggcggggaagccgccctcgaaggagttctggctcacgtcgaacaccttgagactgggcagcgacggcagggacttgggcagcgtggtggcgaaggcgttgttggagatgttgagcaccgcgagcgccggcagccggaacacgtcgtcggcgaccttgccgctcaggttcttgccggagagctcgagccgatcgacgaggccggcggcgttgcacccgacgccggtccacttgcaatgcggcgacgccttgccgccgtcggtccagtcggcgagcgcgctcaccgtgtcgacgaagcccgccttcaaggcgagaagcgccgaccgctcgtcgccggcggcggcggcgccaatgccggagggcaagatcaaagacagcactgtcactagcagcagcactggcactgtagcttccattggaaattggaacaaaaatggaagcacctttgctgagcttggagagcactagctctgcttcctctgcttgctctgcctctgctgcttctagtgctgtgccatgtcagtgcagtgtctgctctgcttaatttagtttactgcactgattgcatctgcaggaagagcagaggctgcagcagctagcaagctagagatcacaacaaggcagaaaagtcatatatatgatggtgatgagaagattggttagagaaggagcatatactaatataaatcttcttggcattttttaacatgcaactttgatctagattagtactagctctactctacacctcaacatagtgagcaaatgtgaggtgttaatcaggattagattaagggtttaacaggctggggttggggagctggaggagaggaggaagaaacaaggagaagggggaggcatgagaacatggaacatggagggaatgtgttttaaagtcatggcttttctaatctgcttttgagcaatataccattctttattattttactttatcccacccaacgttagattggactaattaatacatgtttattttacattccctatctgtgcagagttgcagacagtagattagctctagcttttagacccccaaatactagtagtagtaccactatacagagacctactgtaattgggagttcgtacggtttattctttggaaccttctgctttcgtcagatttactcctaccatcttattttctacaaagagaactaatttactcatacagtttgtgtaggtgtgagtccaacaattgaattgatctgataataaactaagtactagaagctagctgaatttctccatgtaggaagctagaagagtagaaggatgtgaagagctgctcctaattttgagggaagaaatactgctaatatgttttttaagtgtctgtaaaacaggacataccttagcactttgcaggtgaaaatgaatataaattaacccaaagagagacaatagggtatgttcttgcctcttggtgttgtcctgatgcaactagcaccctaagatctgtacacatgtcctgcataaaaattaaagaaagtttaccctgagtgaggcatatgtacagtggttgcatgtgttgagccctgcctaagttgacctcgttaaaataaaatttgtgctaatcattcctgtgacagtgggcagtagctgctgctgttactgctctgttctgacaaggggattattggttctttgcttggcacatgtccccagtagaatgtcacagctagtaccacatcagattaagacaacaaaagcaagtaattaaatgggttaactagcagagctgacacaactaaggctgacaaaactatcaagagcagtaataaatttggactgctgggttgccccatgcattcttccatgcctgatcaaatgcttacaagctacaacaggtgcattagggaaagaagcacttcattctatattctagaattagactcaggcattagaagaatttcaaggaatgattccttgttctttttttacagagatgatccttgctcctaaaaagggaaaaatttgtacagcaaataagtggtagtaagggagtgcccagtagcaactaaagcttcttgacagtctgcagaaccttctaacagagtaggactatgaacatatagaggagatgtttagtggtgcatattatgaatgctgaaaagtgcagatggatatttcttacaataaactgtaggaataccaaaacaaatcaaattcttaatcctcacaaaattttctaccaagttgatgtattgtctttataccaataacgatattacaccatcctccttaatagttctttcctaatttgctgtacttcacattgccatctagcaacattcataatctctcattatagtaggtttacatatgtacatagggtataaaactctagaacatattgaagtatgttgcattctatagttttctgaaattgacggagactatacaaaatgattgacatattcagcggcaactaagttagacaaatcacgatgataaacacaagaaaataaccaaaatgtcaagataactcatagcatgcagccaaaatgtgaagcaaaagtttggtcaggaaatgggaaaatgagaacaatcaagagcactttcatgcaacaacaataatacatactggttcttgcatatatagttgcattgtactcactaacctcctgtttctcagtgaagaatgaattcaagacaaccaataacagaagttgcattttggacataactgagatgctcttgtaaaaggtcttaccctcaatcttaatacaaagctacgcgctttgcgtattccccaaaaaaaataacataagttgcatcaaagcatcaaatgatgttcatatgtgcttacagtccaatttgatgtatctggcacaaatcagaacggcaagctccaaatgtgccacaaacaacaaaatggatacaaacacatgcatctcaattaatacctgaaaattccatctatctagcctaatctagttcgtaggagcctaagcagagtttcgaaatttgtgcagagaaactttgcaggctgcgaactgacgtactcaagagatgatcaaatgttgggcgtgtggtgctatttaagcaaatgtttgcaccaaccaaacttaatcatgcaaccatgagtttggtgtaggaaatataaagatagagaaaaaagacacaaagttagctatgctagcctgtgacattctcttgatgattattagccttttcttcgcttccacaatcattctgttccagcttgttgtggaatcataaagcatcaagcttagcttgctgaactaatggcatgcagcatagcttcagtgttcagattacgataagttgccatgtcgtgttactacctatcctgctaaaagaacttcaggtaagctgcaccgttagggcaactacgtgcactgctatctacaactagatggaataattttgacagacacgtcaacttgttgtttaaccgacaagatgacaataaacaatgtctaccattgagatgtcactgtctttagcggtttatctcaacttgagtgacagagtcttctacagtacaaataaagctaacatgcacgacccctgtcctagcataggaaaaaaaatcacaaacaaagaacaagtagaagaattccttaaccttgcttactttctatcccctcttgtcgtctatctctcctatcataccattcataagctccaggccggcagatccaccggacctaacgtaacgaagataaagaaataaattccgatgaacaattggtgaggttacattgcgttgcatgttgcaaatgggtcaattgggtggcattttcccagccttgccttgccctgagaatcttcccatgttatgttttgttgctcaatactggagaagggaaggatggaacctaacatcccatccctggtgtctactttatcaggttcaggttacttcataccaaagttgaaattgggtacatgaagttgaataaataatagttgggtatatatcaaattattgttaaattggtattttaaaacttacaaataccttgaatagtgtatatatagtgcattttaagtgaaaaaaaagagagtaatgatgaataagtaaaagtaagataaaattacagcatacaggattacaggatcagatcataagcttgattttgaagaaacatttcctaaacatcaaggaaaataatttgtgagatttaggtttacttcttgccacctataaatcttaaagaaaatctaaaagaaactgagtggattagagggcagtataagtgtacagaccaattgaaaataattacggagtataggaaatcaagaaaatgatattttataacatataataaaagaatcatttaacatgcaaaactaatcatggagaaacatgcagattaatcatggataggggaatatgtttagttggctaaacagcctcaccaccctagctaagcaggcacatgcacacatgtggcccattgatagacggactccattaaactgaggctggccatgtgaagccctcttactaagcagcttccaaagtatatgttaacccttttgttatcagtattctttcacatgacattccagtgcctcttatgacacccacttccatgtgggaccaaacgggttggacccaggcgtcagtgaggggttcctagagtgtcagggtagacaggtagaggataatggagatgatttcaccattattgagcatgaactgcagagggtgagctcaactaataataatgcaaatgagggtactaatatataattttctctccaatgaatctaatctaatcttatgaagtaattttcttttgcatcctttttctcttcttctagtgatgcattcggtgagagcatgtgagggccattttgatgtaccttttggaagttggggatcgagttggaagctaatcattcatgagaggcaggtggcggctgcagcattttggttagttctgctgcggtggccggcaacatgcaaacacgcaatggtaaccataacggatggaagaataaaagtatatatggtctgtccatcaagtgttgttattcttctcaaatgatgtactcctttacaatgttaagcacactaccaaagggaaattagtagtctagaagctagctaggatcgatattagtgaatataattttttagaaaacaatgcagaatataagttttctggactactgagccatagatcctaagtccgaaaacagatgaaaaaaaaatttgacatgaaaaacaaaagaggaattaaatgactgagcccagtattctgaacaaatttcagaccgcaaactgaacttatgtacatagcctaagaacaaaaaagctaaacacacttttttttttcacattgaagcacatagaagaaaatcaaaacaattctggaattttctgtcagagtaaagcgcacaatccgttggaactaaaccaatattcacaggtgtgtgtagagaccagatattaatcgtagtgaagaaagaaattgcagtgggggcgtgctgaactcacgtacatgtacatcgacgtcctcgtagccacaggcagcgtcgttggcaagacaaggtaacgtacgaccgttgtcatcgtagacgcttcccggattggaaccgccacgtcgtggattgccggcgaggcgagctcctccggagacgagaatagatatcagtgtgcatcaagatgatgccgccgcttctggccactccggggcaaacccacgatcgaacaccttgagtgcagccgtcgttcgttgttggtggtggtggcgggcggaagatgcggttgcagggaaccaggcgcaggcggcgggttcctgagaatggcggcagtaggcactagcgtcgactcggtctcggtgggtgctctccctctcctgcggcggccggcgggctcctgagactggcggcgccccgcgcccccgccggacggggagacgacaacccgttctgggccgtagagctcacatggccgtttccttctcagtttggaccacatatgggccgacacttaccgtaatggcccaataacgggattgggtttttacgttcgcagcccatgttaggccgggacgagattctgacttttgtgcagcccacacaaattgggccaaattatacgtgcggcctatttatgcgtatgggcctttctctcgagcatgaaaacgggccaaaatttaccaggtttaccgtgcgggaataaattggaatgggcctcaaattctcaatctcatcgacgcagccggcgtggtaaagtcagcccaagccccatggaggagtgatgagtgcgcggcgccggctaaacggcggcagcacgccaccggcgatgtcggccacgttcaaacttcacagcatcggagttggtttctatgtggagtatcgcagcagatccgattccgatgcggcattgcgcgtaatttggctataaatccgccgcggatttccttcctccgcaacggcgacggcaatggcgcagccgagagtcatccgggtgcgcgcccacgacgggcgctccaccaccgtcacgatcgccgcctccgccaccgtcagcgacctcaggacggcgctccgttcctccttcgctcccgcgctggtttcccccgacttccacctcttcctcaagggcaccaagctcatcgccgacgccaaggtcggcaacctccccgtcggccccggcgagtccatctctttcatcccggtcaacgccaagtcagcgccgccgcaccctccgtcgtcgagcgcgccgaatccatggaggaaacgcaagttttcttggcacgacggcggcggcgaagacatctacgccaagaagccgacgaacccagcgccgccgaggccgctctcctgccatggcacccaacctctcgaccctacccaaatggtggagcatctcaggcaagggctcgggaaggccggacagatcacccatgtcgaggagatcccgggaagggaggcgacgttcgccgaactccccggccacctctcgtcctccatgagggacgcgctgagaagcatcggcgtcaccaagctgtacgcccaccaggcgcaggccgtgcaatccgccgtctccggcgagcacgtcgtggtgtccacctcgacgtcgagcggcaagtcgctgtgctacaacatccccgtcctcgagtccatctcccagagctccgcgccatgcgcgctctacatcttccccaccaaggctctggcccaagaccagctcaagacactgctcgagatgaagccggcgttccgctcagacttcgacgtcagcatctacgacggcgacaccgccatgaaagaccggacaaggatcaggaacaccgcgaggctgctgatcaccaaccctgacatgctccacatgtcgatcttgccatgccatgctcagttcaagagggtcctcttcaacctcaagtacattgtcatcgacgaggcgcattcctacaagggcgcatttggctgccacgctgcgttgattctgagaagattaaagcgcatctgttcatatgtttatggaagcaatccaacattcatattctgcaccgcgacattggccaatccgagggagcatgtcatggagctggcaaatcttgatcgagtcgtgctggttgataatgacacgagtccttgcggctcaaagaacttcctcctgtggaatccgccattgcaattggcgaaagcagaagacagaagaccaaacccagtactagaggtttcctatctgttcgccgagatggttcagcatgggcttcgtgccatcgccttctgcaagacgaggaagatgtgtgagcaggtgctaatgcagacgcgtcagattcttaaggagacagctgcagaattggtgaattctatctgtgtctaccgtggtggctatgttgcgagtgacaggaggaagatcgaggctgatctcttcggtggaattcttcgcggcgtcgcggctaccaatgctcttgagctggggatcgatgtcgggcacatcgatgcgacgctgcacctgggatttcctggaagcatggctagcttctggcagcaggcagggagatcagggagaagagcaaagcagtccatagctgtttatgtagcctttgagggtgctcttgaccagtacttcatgagatcaccacacaagctgtttggcaagcccattgagcactgccaggttgattcacaaaaccgcaaggttcttgaacagcatctcgcttgcgccgcttctgaatatccactgcgtcaggaacatgacgagagctactttggttttagcatgaacagtgttttgatgacactgaaagataagggctgtctcatgaacaatccatctggaggagattcaggcgtgtggaagtatattggacctgataaaaaaccttctcatagtgtaagcatacgggcaattgagcatcacaggtacaaggtgatcgacaggagaagcaatcgagttcttgaagagattgaggaaagcaaggctttctttcaggtgtatgatggtgctgtctacatgcaccaaggtgtcagctacttggttgataagcttgatctgacatcaaggatagcttactgcaaggtgtttgatctgaactactacaccaaagttcaggactacactgaaatcagtttcattggaggtgatgttgatgaacatcctgcgagtgagtgtaaacctgacatcaggaggacaacagctcaagcaaatgactgcagggtgacaaccaaatgggttggctttgatcggatattgaagtcaaacaaccagaaatccgacagcattaaccttgatcatctacctccatactcctttgaaactcaagccgtttgggtacagattcctgtgtcagtaaggacgactatggagcagatggaatatcagctctgtggtggtgtacacgctgcttctcatgcgcttctaagtataatacctctgcacatgatgtgcagtggttctgatctaggaacacaatgtgcagagcctcaagaaaattctgaaactgcagacagaattctgttgtacgacaaacatcccggtggcatcggcttagcatcacaggccaagctgctctttggtgagcttctggttgctgctttagagcttgtttcatcatgcagctgcaccaactctgatgggtgtccaaattgcatccaatcatttgcatgcagtgattacaatagggatttggacaaggaagcttcaatttttcttctcaagggcgtaattcagtatgaaaagttgtattttgaagccatagatggttgttaccagagctgaagtgcaaatgacctagtacaagatatatttggatgtagcaccaactaacgtgtttgttataggtgccaatagaacttgagtggaaaataatgttagcgaatatttggttgtagtgtaggacactgcaaaatgcaaatggtagtaccgaacaaaatttgcgtatccttttatcgctatgatgtattttagtatttttacactagtcgttaatatttttgcagtcagtctgatactccgatgctgcagtgatgcttatatttttatcttctgtttttagtagactcatcattatttttgggcctattattacttgaggcttctctaatcctactagtattacaaatttttttctttgataggagtattacaactatagtctattgctagtgcatacttgtagttgtggccttggtgagctcctgtttcagttaactcttgttcagtggccgcaaggccctcaagtagcagtggctgtgtgttctgtacgaattcagtgtactgctttacaaatttagatggagttgttttttgtgtacaataacaagaaatattttattggtcaggcctagtttctgtgatgtcctagaacagatagctagtgtgtctgaattctgaaactaatttccttgatcattcagctcgtcagaaaagtggcctgtttatgcctaatggctgataatttggtgaagaggggatggccacatgaggagagctgtgctctctgtcagtgagaacaggaggactgccagcacctatttgtctcatgtcagtttacagggcgagtttggaagctagacagcattttcggacgggctacagggagctcttcgacactgttttcatgctcacatgctggttcatctggaaagagcgtaacgggaggattttcgagcacagatcaagagcacctgaacagctagtgcatgacataaaggaggaactaatgatctggaagatggcgggagttttctcgcttgttagtagggaggctctacctcactgccgctgcgacagggttctgtcgttgtaagcaaacaattttcgtttattttactcctaatcttaatgaaattggtcgaccgaacctttcggcctacccggcacaaaagaagagtggcatgttctctttctttgcctgaaactgaaggctctctctctctgaagcgttaatttcaacgtatggggagaactggagaacatttggcaccaaaaatatcatctgggtttgccaatggaagagatgtaactgcagtgctaaactctcagacacacagacacacatgtacacagacaatgagacagctctgaagctcgcatgataacgttggcctcatctctgaatttctccgatgaacaggactttcagaattcagattactgggctgctttccttccatttcagcccacatctctgaccggtttccaccaaagaactcgcgccatctcaacttctacagctccaaaaccacaactgcaaaattgatccgttcatcagcaacctgaattaattgtcttatgcgtgaacgcgagatcgagatgatgagcaatcacttacagtcagaatccgtggtgatccactgacacagcctgctgctgccgccatagtcgtcgtcatccgggctgccactgcacgacatgctgctcatcctgtcatcgtcagctgctgaccccgagctgtctcgccggagcctcatgccgtgcttcgtcgccggcgacggtgagaactgacgcagcgccgccggccacagcggcgactgcgctggcgaggacgagcagctctctgctgtggcgatgtcccagctgaagctgtcgctcttgctggagaccggcgacgagctcatgccgccgtcgctctgccggctcgtcgtcgtcagttgctgctgctgctgctcctgcttcctcctgctgttctgcaggctcaccaccaccctctgacaacatcaattagcacaaaaacaagttaaatttcagaggttcaacacagaaatgcaactgaattcatatgcataaattagtcagagatcgaatggattttggcttaccttccatttcttggcactgacaagcacggtggaccggagcttggactgcgccgacgactgagcggccgctcgccggagcagctccctcatcctggacacgatggccttccggcggtcgtcgacgaccttcctctccggcgacccctcgtccatttccgactccgactcctcgtcgatgatgggtagcactctgcacgcagcctcaacgccaccactgtgccccatatcaactgcaattaatcactcctcacttaaggccttaattactatagctcgctcactcgatcactgaactgaaactagcaaacatatgctggatagctactcgttagctgaaatggttggtcatatatatacatgcaatgcatgatctgtccagtgctgccgatttgtttcagggatcggagaatctagctagctaagatggaatccatcagctgcatactaattgttgttaatttactcattttaattacgccagttgatccacatactggtatacatacatacgcatgtgaaggaggaggaggaataattatagattcacagatcgaccatgttcgatctgcaagctcagatgaatcttaagtttggtacgtggcagtgtccattcgagggcgaggaatcgaacacgtcacgcagttaagaaagaaaattgcaggcacatctggatggttttgtccgtgttagggcttggtgaaatatacggaggatttcggctaattgcagcttgtgtcgtttactgggtatacacctggaagagaggagtattaattaattaattaattaattaattaattagtgtaactaatccaagggggctggactgaccacgttgttgtttttactgatcacgatcgctgctcgtattagtaatgtacaatacaaagatgctcagcgatgacgattgacgacgacgacgaccaagatggtgattaacaaacgccaatgcaacacatgattagtgtagtgtatcagtattagattgattagcatcgcgccgctcgatgagttggccatgtgatcgatgtggcgatcttttcagataagaacaagatatcatcagagttcagttcaggactgcctagtgggccaaggcccaggagagaggattgaatgcgtgggccgtatgtctccaggcccatgatagagttcagcacgtgtcagccaggtcgaaagctttcggcccaacaaaaaatgaagcgtttggagattcatggcatgatgaacaatcggtattgattgatctgatgattaaagattacgaggaaaatagatcaattcagcatgattataaaagataaccttttggggggggggttaattaagaagagtctgtatagatcgtgggcccttgtacggctgctgtaccagctcctacaaagtcaaatgcctctgaaatttacaagcaattctttttttttccctcaagactcaatgatgcatcacttgatgtcacttaactggcttgatcataacttatcatgcatatagcacggcgcgcagccctgataagtccaaaaggccagatttcatgtgcacgtctctttgagcttttttcaattgagaaaaactgatgaaggtaatcaaacaacacattgaaaaggaaaagaaagccttacagaaacgggtggagattccctaattttacacattaaatgtattcttcttcattacattaaatgcacatatttatggatgaaaaatatcgagcggtcgatctcaagtaacatacaacgtagtaggacgcaagtgtaagtggagtacacaggtacacatatttgtactagaaccggccacatggcagctttcatgattgatttcccaatagttagattctacaaggcaggagaccatgtcaccgtaaccgagaaattgccctaaattgagaaatgagaatatatggatgacggtgtagaacaatgaactggatgctatttgtcccgccgagacgtcaatagctcatttcacttgtccccttcgatcagttgtagcattgattctagactgcctttctgtcccctgtcgtcacagtgttggagcaagcaagaattcagcaatcgaaatatcgaattagttaggcaagtgttaattgtaagttgtaacaaccgatttgcagagtcgcagcaataatatccaagtccaaagtcgtatttgcagaattaaatttggtggaaaaaaaatatgcctttggtacaagtgtaaaaggcagcaaagacctgaaggaagaacactagaggtcatttgtcccttgctgtcagtgtcagcggttgacaaaattacatgatttgcatagtcagagcaaatgatgcaatgcgatggccgttcgattgctgcaaaagatgcgatttactactaggacgaagccgtgttcatggttactactcgacgtcgctgttgtctgtcactactgatgtttactgctcgatctacttcagctggccgactcggggttttgatgatttgaaattaaagtcggcatcgaaatttgtatcgatcaggaaatgatttgaaagtcaaattggtgcatgtaacagatatgctgtaaatgattttctattggcatttctaggaaaagcatatattcacaaagatatcaaaatttcaggtagaaaaattagctgaagttgaaaatgctactagctgggcgcctaaaccgaatccaaaggctaatttttatttctttcgaatcatatgaaaaagaactgcaaagtgcacattaacacaaaataattttactcacctccctccaagaaaaagaactacaataggcctcaactatagaccagtggctgctcgatctggaccttcctccagccttaggctggacaacggagctggtcagccagctaatcaatgtctggagtgcggtacacaacgtacatttcacagaaaatgaggaggacaagatagtgtggaagctcactggccatggtgaatatacggtgacgtcggcctacaaagcgcagctcttaggtactacagccaccaacttcaacatcataatatggaagccgtgggcaccacgcaagtgcaagacctttgcctagttgattatccaaaatagagtttggacctccgacagactggcaaccagaggttggcagaacgattatttctgccccttatgtagacacacccaagaaactgctctccaccttcttgcagaatgcagatacaccaagaaaatctgggcggcgttatctgattggactgggtgtggtcaactaaatcccggtcaatggcaactagctcaatcggtgttagagtggtgggaggccaccgccaacttgaaggaagccccaaagaaagcacttcacacgttaacacttctggtcaactgggaaatctggaatgagagaaatcgtagaatttttcagcacaaagagttatctaccggaagtctgttggccaaaattaaaaaggaggccaaaacatggtctcgggcgggggcgaggcatcttggtagctggcttgcttcttatttttagctcagtaggaccgaaggtcctgggcctggtttttcttacttgtaaagtttactctttctctattcaatgaaattggcagcttaccgattcgttcaaaattttttttttactcacctctggctacgtctatgcatacttgcatttacagctatatctgttatttttttctgtgtgaaattgtgaagtggcaaccagctgaggaacaacagatgaacagatcgattctgcgcatgcatcaggtgggtcccatattggcgttgcatattctgatccttggaggattccatgggataaaggccactctgctccggagatgcggcgccgaggttatctccttaattaatctcacatgacttcctcttatatcatgctactagtagtactatattttcagagttcacagctgatattgtcaacgcttgctgcccccttatcgctcgtaacgtaataatcgtataatcacataattaaaaatccactcttgttaattcagcaataaacttcagagttcagagaacgtgtccaggtctgtcgatattatcaggtgagagaacggagacgatgaggccattttgcaccagcacgaatcttaaggcaaatgccataaggatggcgccaacgagagcgtgccaattcccgcgcacctgaagctctataaatagctgggcgatgcgtgatcccaactcccaagccaccagcaaagccagcaattgcatccgagctcacctagcttctctcttgcaaccagcgattcgatcgattccatctccaagaagcagcggctagcagcagctagtagttgccatggactcgtcgacggtgggcgctccggggagctcgctgcacggcgtgacggggcgcgagccggcgttcgcgttctcgacggaggtgggcggcgaggacgcggcggcggcgagcaagttcgacttgccggtggactcggagcacaaggcgaagacgatcaggttgctgtcgttcgcgaacccgcatatgaggacgttccacctatcatggatctccttcttctcctgcttcgtctccaccttcgccgccgcccctctcgtccccatcatccgcgacaacctcaacctcaccaaggccgacatcggcaacgccggcgtcgcctccgtctccggctccatcttctccaggctcgccatgggcgccatctgcgacatgctcggcccgcgctacggctgcgccttcctcatcatgctcgccgcgcccaccgtcttctgcatgtcgctcatcgactccgccgcggggtacatcgccgtgcgcttcctcatcggcttctccctcgccaccttcgtgtcatgccagtactggatgagcaccatgttcaacagcaagatcatcggcctcgtcaacggcctcgccgccgggtggggaaacatgggcggcggcgcgacgcagctcatcatgccgctcgtctacgacgtgatccgcaagtgcggcgcgacgccgttcacggcgtggaggctggcctacttcgtgccggggacgctgcacgtggtgatgggcgtgctggtgctgacgctggggcaggacctccccgacggcaacctgcgcagcctgcagaagaagggtgacgtcaacagggacagcttctccagggtgctctggtacgccgtcaccaactaccgcacctggatcttcgtcctcctctacggctactccatgggcgtcgagctcaccaccgacaacgtcatcgccgagtacttctacgatcgcttcgacctcgacctccgcgtcgccggcatcatcgccgcatccttcggcatggccaacatcgtcgcgcgccccaccggcggcctcctctcggacctcggcgcgcgctacttcggcatgcgcgcccgcctctggaacatttggatcctccagaccgccggcggcgcgttctgcctcctgctcggccgcgcatccaccctccccacctccgtcgtctgcatggtcctcttctccttctgcgcgcaggccgcctgcggcgccatcttcggcgtcatccccttcgtctcccgccgctcgctcggcatcatctccggcatgaccggcgccggcggcaacttcggcgccgggctcacgcagctgctcttcttcacgtcgtcgaggtactccacgggcacggggctggagtacatgggcatcatgatcatggcgtgcacgctgccggtggtgctcgtccatttcccgcagtggggctccatgttcctcccgcccaacgccggcgccgaggaggagcactactacggctccgagtggagcgaacaggagaagagcaagggcctccacggtgcaagtctcaagttcgccgagaactcccgctccgagcgtggccgccgcaacgtcatcaacgccgccgccgccgccgccacgccgcccaacaactcgccggagcacgcctaaggcgtaaacaattctgcgaccgagaccagcaatacgctggagttcgactcgatgataacacgccggagcacgtccttgttgcaaacggtgatgaaattaagagtgaaatatttccttaggaattgaatcctttgaaattaattcctttggaatttctccgatacaaacggaggtataataagggagaggcatttatacctatgtacatgttacacttttttgaatttacagtgtattccatattgatgttgtcatattgacactccagctgaaaataataggagtactgtcctgtggttgaactacgcaattattttgcatacaaatttcaaaaaagcggcgagcaatacatagttgagaaattcgttagttacatcttatgatcagggccggggttaaaatttgagccgctaggtgggtccagttagtcaccaggccagtaactttggtaaaaaaaaattaacctgtcctaagctcctttctatgctttcttcgtattaaaatccaataaaattcatgcgtttgaaaggagtactgacggcataaagtgtgcgacattggcactgctctcctttctattccttctatcccataatataagaagttttagagttatgtcggtgatataggcccgggggtatgtatcaggtttagagggaggaggctgccccccgatgccgcgtggccctcccccaaggggagtcaggcccgaggtggggtggcggccactctttccccaaagactagtcagaggaggctaccccccgatgccacgtgcccctcccccgaggggagtcaggctcgaggtgggacggcggccactccttcccagagactggatggaggaggctgccccccgatgccacgtggccctcccctgaggggggtcgggcccgaggtagggcggcggccactccttcccaaagactagtcggaggaggctgccccccgatgccacgtggtcctcccccgaggggagtcaagcccgaggtgtcacaccccaatctggcaccgtcgtacaacggcacctgataggagcgtgtcgtaggaaaaacggtgcaaaccgctccctacgaaaccgcgatctcagtaccagtcccaggacatagcgctggtacccacggtgacaaatatgaatcattgcaatccttaaaataaatagaggacttatttaccttaacttaggttgcagctcagacagcctaagaatgcaaccgacgacacggacgaggcaaacaccaacaacagcagcagcagcggaaccaacggtctaacacccaataccacaggcgacggctgggaaccaggacaaaacccttaatcttcactttacttcatcttcaacttcaggacggaggaactatatatatttatatagagcaagggtgagtactttcgtactcagcaagtcactggaatttaggtgtttaatgcaagcttggaagaggggcaaggttgttttgcaaatcctttgtttgaaatcactaagtgatttacttcttgttaagtttgggccgaaaagagacttgcgtctcaaatcgacttaagagatatttttcaacaactcaattggtaatgtatcgacctcccgggtcagatcattacctctcggctcccagagctatttcacttgattaatcggctcccagagcctttctcattttctcggactcccagagtccagctgcccagcagcacaacattccgcttccactcgggaagcctagtctatgatgcccgtagacatcccgaatcacacagattcgtttctgaccactcaggtcatccatctgccacataggctgattctggttacgattcccatcccacaacaacttttcacaaagcacaggcaaacaaatctacgcaacgggaaccacctcacatccgcccatgaccgtgggcacggctgttcaaacagttagttaacctctgcagaggggtacactttacccacaagatacgaacttattccgaacacccgtcggtgtcggaggttcgcaacaaggcctttcctaagccggcccagggttacctcatgccacatagaaggatcaaatcctcacataaatatatgccattttagttttcacaaatcaaactccaaccacctcgatcggtaattcagcaagctcctattccttgcttaccaggaacccggtttggctccaaccgaccccgccccagcgttccccaactattggcatgcgaggtttccctgaaccgactaattacttagccagggtgtcccattccaccttgtggttgcactttgattatgctcgatgagtttcccacaggaatcggtccttatatgcgaacacgggacagtgccacgcaggcacaacccccgcatcgcgagttttcacaattcattttatttttaaacacaccgacaccacatgtcgggttttcaaggcttctcaaacccatttcccaagttttcgacaatcaacgatgtatgtgagatatttggtatacgcgctcagagagcacgaataccgaagtaccacaagggtggagcgacaaggaatcatgatagtacagcctacaggaattagtgcgactactgggtaggtccgtcggtttggcacgcaaatcgaggccaagcaagttatgtgtgattctaataatgcaagttgcaaacaaaataataatgattttccaattataggggcaattgatcaaagggtgacttgccttgctcaaggtcttcacggagcttcacgaatcttcgagaaaacccgcgatcggcgaaaatccggtaaccacaactatacgcaaacaaacaaaaacctaaacaaaagaccaagaaaaaaaccctatttagactaaataatagtgccattaaatagatctcaattttacggaattactggaagttgaacggagtcaatcagaagagcggttgggaagatatgaattttggaagttcaattagaatttctggaagacgagaaatggtttatggaatttatagaaataatattctcaagaatattattgacagtcactgacgtgcggggccaagggtgtactgtacatgggggggattaagtggacttttgttcatgtgtgtgggcactgggcttggacagagggagtaaaagtagacttttcattttcccctaggccgagaaggggggatggttgatgggccaagcccacgagcggggagagggaggaggggggctgactgggcgccggcttgactcggtcaagcgggcccagggctgaggtggcgtccacgtggaagccacgtcggatggggaggtagaggaggccgggcaggctgatccgatggccggcgacgagcgacgcaaaccggcgaacggcggcgaggtggattggggggttagcaccggaagagagaggaggccaaggggaatcgattcaacggagcggattagccgggggaagaacgacggcggccgacggcggtggccaatctcgccgacacgctgatgtggccgcgcgtggaaagagcgaagggcgcgcggtctcgggctcagctgtcgcggaaagggggttgcgacgcgcacacggtgacgcgggacccgaaggtcaccggcgacgcacaggcggcggcgctaagcggtggcggaaggggcggcacggcgcgagagcgagaggggaggccggcggccatggggcaacaagggggagatcaaggggatccccgggagcgtggtggcgagagggattgacaagaggggagccgacggcggcggattttgacggcgatcgtcggcggcgagcaaagggggaaaacttcaccagggcaacgggggttcgattcgttggagctggagcatctacgcgaggtcgcgagctcattccatcggtcgagagggcacgggcgacgccgagagaggccggcgacggcgagcgacgcccgggacagagcaagggcgcgcggcgagatgtgacgaatggcggcgggcgcggcgcagcgtgcgacaggggaaaaggggttcagtggggagctcaccgacgagagaaacggtgtcggcggcgcggatggagtcgtggcgaggcggacgcgacggcggggcggcgcggccggggaagaagagatggagaggcgcgaggatgggggcggcgcggagctcctcgtcgactcctcgtgctcgctagctccccgacacgcacaacggcagaggagggcgagaacgacgacgaacggcgaggcggcagtggtgtgatggaggagaggaagtgagaggtatgggagggggggtgtgggttttataggtggcgatgtcggtttgggagaactgaccttggggcggtcaaggagatgaggcggatggcgcgagcggtcaagcggcgcagaggtggtgacgccggcggtggtcggggaaaaggaaaaagaagggggaaagggggttggtcctttgccatattgaggagagggggagcagctgcttctcctattcttggtagatgcggcgtggagtggcgggggccatggatgacgtcggcaatgacggtggcggtcggtttggcatggagcgggggcaaggcggcagcgcgtggcgtcagcggcgcaagggctgatggcggcggcgaccgggtggcgagcgcgcgcgcgggaagggcgaccggcgaattcaaacggcggcggcgggaatcggcgccggggagaggagttcgacgagagagagagagagagaggaaggagacaagagaggcgctgcttctctcgctcggcgcgtgcagcgcacgtgcggggaggaggaggagcggccgagaggagaagatgggctggaaaagggaaaaacggcccaacgaccaagagggaggtgaaacggctgagggagggaggtgggctaagggggaaaacggcccacaatacccgagggaggtaaaatagacttttgtagagaagactgatttggagtggattcgaattggggttttggatttgaattcaaatttgacattcgaactcgatggtttagggaggaatcaagggagactcgaggagaagtcaagaaagagattcaaaacggaaacttggatatttttttttgtagtcggagcgaatgttcggcaaggattcaaaggaagggattgactttcggaatttgatttcggagacttgaattttggataggaaatcttgaggtggaggatttttgatttcgatgagagggaacaacgggattgaattgagatccatggcacgacttaaactcgcacacaaagaacaaaattttcgcaattaggattttaccgaattagtttttaacgtctcacgagaagcggagcgttacacgaggtggggtggcggtcactccttccccaaagactagtcggagaaggctgccccccgatgccacgtggccctcccccgaggggagtcaggcccgaggtggggtggcggaaactccttccccaaagactagtcggaggaggctgtcctcccgatgccacgtggccctcccccgaggggggtcgggcccgaggtggggcggcggccactccttcccagagactggatggaggaggctgccccccgataccacgtggccctcccccgaggggggtcgggctcaaggtagggcggcggccactccttcccaaagactagtcggaggaggctgccccccgatgccacgtggccctcccccgaggggagtcaggcccgagttaggacggcggccactccttcccaaagactagtcggaggaggctgcccccgatgccacgtggccctccctcaaggggagttaggcccgaggtggggtggcggccactccttcccagagactggatggaggaggctgccctccaatgccacgtggccctcccccgaggggggtcgggcccgagaaagggcggcggccactccctggccgagactagagggagaaggccgccccaggcgccacgtggctccccccgaggggggatcgggcccgaggtcgggcggcggccgtcccctcccgtaactaggggtcgggctcccccaaccccctctctaggtcaccacgtacggtgggttaggtatccacctccaggtgcccacctacccgcatttatagcgacccgagcggtcgcgccacgccgcatttaatgtggtgtgcagtgcactcaaccggtctgtgaccggtcgaatgactgatgggacccaggatgtcaggcgcaccatcgcgtgtgtcaggcgacgtgcaacccgacatatcccatcaaataatgatggtgacaggttatcatcctcttatcccagccggagtcggtcctctcgctctggtcaaagcaaggctcccgtttcccggtgtaataggagcccagaagtcttcacccattaaatggtgactaacaggggcaccccccatgtcaggcggcaagatttgacaggccccatcatcaagatgacatgcgcttggcttcccaagtcaagagacaagacatgcatttaatgcaaagattataatacttctccaccggagctaggttaggttgttgggcccatgtggtaacctcttgaggtataaaaggaggtccaggcctagtggtggagaggggggggacttccgagcgaactggctcttgggtctcgcaaccccaaacactggtgttctctactcaatcaatcaagcacaagagtagggtattacgcttcttagcggcccgaacatgtataaaccccttttgtttcatcgtctttgggggattgaacctcctcaagattacacagcttcgctcaccaagccctcgaatctcacccgctgcccccggccgaactcacaaaggggggcctcacggttccctggtggaggagttcattctccgacaagttggatatggttattaagaaagtaggtacaagtgaatgttggaagattgtgattggacgagtagtggaggtaggtgggaaaagtgaatagtagagggttgtgattggttggaaagagaatgttggtagagaagttatattttgggacaaatcctaagggctaaaagttgttatattttgggatggagggagtattctgttaggttgaaaatgatacgatggctccttaagagcaagtttaatagtataaccaactagtagctccaaatcatctatagtcaacttaatagccaattcatataatagttacctataaacatatacttacatggtcccatctatcatacacacattgtgtcgtggagtccgtgctacagctggctacaaatctgtaccccactgctcttctctctcatattttatcttctcgatatgtgtttatagatggcttatagtctgctgttgtacctgctctaacatctcatggtgcaagggggcgatggcatctcgatttgcaaacaagcatgagagatggcggagggttgctggacacgtcatattccataattggttaaagctcatctcttaaaatttaggttagatttgcacattatttttttcaaatttaaaatttgatcaaatattttgtttgaaagttccaaccgaattttgaatttataaattttgctaaaagtccaaatttctccccttttctgtcagttcacacttggcacttgggagtttgcctaatctgactcttgccacctttttctttctttcttttttgagaggaaggacaccctttgcttccttctttgagcaaacctcaaaaaatcacaataccaattaagttcacacacacaactatacaggtgcatctaatatattgttttctaagttgacattggatcagtagaccatttccaaagatgtgcacatttcatgtcataatcttactcgattataaatttgaagatggtgagataagccatttgttgtggacattaataaggtccaacaagtacctgagctgtccttcatgtttgtctaatgcacttccatgaactttggacatgcacaaattgttgctaagttgccaagtatttagctgttttttttttcctttcaaataatattgcttcttctggttgacagttgacaccttttgatagttccactttcattagggcatctccaagagagggctaaaaaggttcctaaaaattaaattttaggattttcataaaaaacagccctccaacagattcctaatcaagatcccaaaatttacccacgcctaaaaccagtgccaaacccctagattttgggaacatatacgccctcccaatcaacatctcgcgccacttttttcacacccgcgtcttttttttcttccgccaggtgcccggttcttttctacccttctctcgcgccgtttctttctcgagctaggcgcacgccgccgcagttcacctccgagggtttccacaggccgcctccaatcctccatccacagcgccggcggccctcgtaccggtgggcggcggcccttcatccagcgcgccggcagcccctcttctggtgcgtggcgaccctgcatctagggcgtcgctggtcctccattgagggcagcgccggccaccgtcttccccttccaaggtgcctcctcttctacgtccaggtacacttcctcagtccaaatctctactatgttagatttttcaactggacatttcttccaagcctctctaacagcagcagttctacaagagtttacaaaatgagatcatcgctcgtcgcatgaacagttccggttgataggtttgtgtctcataacagtttacattcagttgagtgcccctgtccatgcatatacttgttcttgtctccatcttgttgaaatgctgcctttgcacagctgcactacaccatctgattcgatccactgatacatggggctgcatatatttttaaatatgctgcatgatgcactgccaaatcttggtctgaattttggtctttgaggccaaaagatttaacatactgcattgcattttcagctgtattaccttcgattgagttgatctggatgtagatttctagcatcaaagactactgtatttgttcagatttattttagaaacgttcagaatgttgtgctagctggcaattcagaaatgttcagaaatatttgtttagattatatcagaaatgttcatagatgtccagaattgttcagattattaattacaatatattggaaaaattggcagctgtataatctgtacatgtattctgattcattttaactccatctcattactatcaacagggaaaccaccagatcagagagtgggagggaaggagatggcaatatttggtggcaatcgtacttggagttcagattagtgaagattcgttagaaatttacctaggtttattaagtctgtgcaatgcaaactatttatattcagaattgtgtctgttgtgtctagattaggtggtttactacgtctgtgcaatacaaactatttatattcagaattgtgtctattcagtacttgggtaattccctcatcctgctgcagtaatcttctgtctttgttgcacgcatgcagcaacactacggagacgactcgatcaatcactggttgctgtaaaattagttgagaaggacccacaaatgattatgtggcaaattttaacattttgggacacctcttgaaggggggtgtattttaggccaaattcttttttggctatccccaatagaggatttttggggttcgaattttgtacatctgttggagatgctcttactgaaaagataaccctggctgaacagctaataatcctagacacctcctaaataaccattcggtatagtcaccccccaacagtgatctggccatgaggccatcatggttctttctcttggctttggttgttgccgatttatgttacaatggtcaatggtggatccagattataaatgggtagagattaattaaccactgaagatgtgtacaaatgtggttttatttataaaacacagagctaaaagatgcaccacgcttgcttttatgtcatgtacatagtacctatgtaccggatctgatacatacggggtgtcatatctgataccgaagataccataaatggtacatatggtaccatattgacggtaattattctgttgcaatggtatattgttacgtagtctccctcgtatgcaattctactttcaaataagatctgtaataactgaacgcaatggtatagtcaaagcaaagcttttgcctccatttttttttaagaaaaaaaatcaacgcaatggtgcaaactttgggggtagttttgttggtttatcacaaaaatttcttaacttttttcttttcatttaaacgcttttcgaagcaagtaatacaaaggcctttctccatgacgacatactctagatagtataaagaaaacggtaacaaaacgttcaacagtttatacatgcatgcataattaattaacttggcctcttaattaggcgtgctccggcgagttgttgggcggcgtggcggcggcggcggcggcgttgatgacgttgcggcggccacgctcggagcgggagttctcggcgaacttgagacttgcaccgtggaggcccttgctcttctcctgttcgctccactcggagccgtagtagtgctcctcctcggcgccggcgttgggcgggaggaacatggagccccactgcgggaaatggacgagcaccaccggcagcgtgcacgccatgatcatgatgcccatgtactccagccccgtgcccgtggagtacctcgacgacgtgaagaagagcagctgcgtgagcccggcgccgaagttgccgccggcgccggtcatgccggagatgatgccgagcgagcggcgggagacgaaggggatgacgccgaagatggcgccgcaggcggcctgcgcgcagaaggagaagaggaccatgcagacgacggaggtggggagggtggatgcgcggccgagcaggaggcagaacgcgccgccggcggtctggaggatccaaatgttccagaggcgggcgcgcatgccgaagtagcgcgcgccgaggtccgagaggaggccgccggtggggcgcgcgacgatgttggccatgccgaaggatgcggcgatgatgccggcgacgcggaggtcgaggtcgaagcgatcgtagaagtactcggcgatgacgttgtcggtggtgagctcgacgcccatggagtagccgtagaggaggacgaagatccaggtgcggtagttggtgacggcgtaccagagcaccctggagaagctgtccctgttgacgtcacccttcttctgcaggctgcgcaggttgccgtcggggaggtcctgccccagcgtcagcaccagcacgcccatcaccacgtgcagcgtccccggcacgaagtaggccagcctccacgccgtgaacggcgtcgcgccgcacttgcggatcacgtcgtagacgagcggcatgatgagctgcgtcgcgccgccgcccatgtttccccacccggcggcgaggccgttgacgaggccgatgatcttgctgttgaacatggtgctcatccagtactggcatgacacgaaggtggcgagggagaagccgatgaggaagcgcacggcgatgtaccccgcggcggagtcgatgagcgacatgcagaagacggtgggcgcggcgagcatgatgaggaaggcgcagccgtagcgcgggccgagcatgtcgcagatggcgcccatggcgagcctggagaagatggagccggagacggaggcgacgccggcgttgccgatgtcggccttggtgaggttgaggttgtcgcggatgatggggacgagaggggcggcggcgaaggtggagacgaagcaggagaagaaggagatccatgataggtggaacgtcctcatatgcgggttcgcgaacgacagcaacctgatcgtcttcgccttgtgctccgagtccaccggcaagtcgaacttgctcgccgccgccgcgtcctcgccgcccacctccgtcgagaacgcgaacgccggctcgcgccccgtcacgccgtgcagcgagctccccggagcgcccaccgtcgacgagtccatgccgccggtgacgatgatcttggccgctagctctagcctcttggattgattggaaatagaatgcaaaagtgcacttctgctgctgttgcttgctttggatcgcgcatcgctggggctatttatagagagctcaagttgtaatatctgcctcgtgattcgtgctggtgcaatggcctcaccaaaatcgaacggcctgaacacgctgtcagctctctgaagtctgaactctctgggcttaccgatttctttctgaattaacaatgggtgcattattggtctgaatttaaaacaacaaaattagaggcagctagctagcgttgacagtctcgactctgatctctgaaactacattgcatgtatattacaggaaagcaaagaaccgtttaaattaagctgaaatgaattgataaaggagataacctcggcgccgcatctccggagaagactgccctttatcccatgggatccaccaaggatcagaatatcccatcagatgcgtgcgcagaatcgatctgttgcttgccgattaattaatttctcttccttttctgttctgttctgttatgttatgttctgtatctgtccacagaatccttcagtgttcagagtaaaatgagattccaagaattgtggctcagcactgtttactctggcattgtaactttgttctattaaataacaagaaaaaaaaaactttgcttggattgatgggagcttcttcataaacttctgtattttctcttcatgtttgcagtttcagttcacaacctgcacttcttcttgccatgagatatgcactggttttttttcatgacggcctgaagcaaagcaacggcgtgtcaggatcaacaacaaaagttgttgttagctactagtatcatgttcacggcttcggttctatctaacctacatcttttgcagcgatccaacggccattgcatgcgttatcaatctgactttgcacaccggcttgcaaatatgccaaccctgacactgacagcaaggggacatatgaccctcttgtgttcatcaggtctttgctgtctcttactcatcagttcatctgtctccctgcaattcttcggccgactttaaccttgatagagatttcaggcaacttaccagttatttatcatgtttacaacatatcaggatgtcatgtataggacagaatgttcttttccggaatacgcgagaggcacattttttccattaaaagaaataaaagttatttacaagttgcagatatgtgtccagttgcatttgttttcagcatcccaattcccatacacatcatatgaaccgcgctcgcgtgctcggttatttgtcttgacaacttggagttggaggtcttcagattatagtttaatttgtgtggatatgtcaacacccccaacctttggtatgttccataagttatttcaccctttttctttccaattttgtacatttccctgtttcgttttcgatgttctggtcaaatatataccgttattctatcacggtttttgattttgtttatatatagcttcggttgaagtttgttagttgatgaatttatttgaaggactcagatattgctaaatctggcccttcagttgaactagagcacctgcaggtattttttaaagaaatttgctccaattcaacaaaaagtatctcgaggtaccggtacctcacggtaccaaatcgtttcttatcgttgaatctagctggacatgatgtgcattgttagatccaacgatcgaaaacgatttagcatcatgaggtatcggtacctcgagttactttttgtcgtaccagagcaaatctctctttttttaaaagtgtcaatacaatgaatgtatgatggattcagaagtgtgaattgcatggttacttggcactgatgctttccttccatcatgcatggtttggtatggaaattaacaagttggcatgttgctattgccccagatgccataatgaagtttgacttaacttaaaattaaagaagatgctagtactttggctcagtatttgcctaattggatcagcacacacaaggatccatgtaagcattgtcccaatctgagaagctagccataaaccaggccttatcaatcaaagcagtaatttgttgcaatttcaagctttcagcagagtccatataatgtgcatcaaagagttgaccgtgcaaatacattttctgaagagagctcgcagtgtctgacttccagctgtacaatgacacatcaagagtgacaggtgacttttttttgctttagatttattcttaaacgagttcaagttagccaaaatgctctgcgtagctgtaattaaagtgattaattagtgcaggagcaacatttgggcccgttgaaaggttggtgttggcttttccagggacacggggatggattctccaagctttttatataacacttgaattaatattgcataaggagagtgagtgttacatcctcggtagcaggaggagactcaaagagtcgcaatctcatttttatatgaaaacgattttgctatccatctccgtgtgatttttttctggcatttgacactttgttttggcctccatgcagcttgcgatgcgagcggcaatttgcaagatcgatgttccatgcagctcgccggccggctggcacgtcggcctgtgttacctagctacccccgcgcgcgtgatgatggagaagcacggtgccaaggtggcctctgattgagctggccgccggcagtacggccactctcgtcgtcgtcgtgaaatataaagttacagtcatacataactaaaattacatttgtaaattcagttgatatggcatgtaagtgcactgtaattttaataaaaataatatgtaagtaaatatatatttgttattttctttaaaatataaaattactgtcctatatacctaaaattacatttgtaaattcagttgatatggcatataagtgcactgtaattttgataaaaataatgtgtaagtaaatatgtatttgtatattcttttgtagtccgttagatgtaaatctaagagtaaaaaaaatctgggtaatttttggttagaaatcacccgacaaatggatagacagtcccgtaggccgcggtgcagggccctgttgacgccaaattaggaaaaagtgcaccgaaggtccctcaacttgtcatcgagttacaaaatcgtcccccaaccgtaaaatcaggtatccagcatccctcaactatcaaaaccggtcacaatagatccttaggtagttttgatcctggttttgtcttacgtgacggctaagtcagagtgggacccacatgtcatgctgtcatataacccacctcttctctctcttttcccctcttatctcccttctttatctctctcccttctctgacttagctggcgggaggaggagggtgtcggcgagaggcgacgcggcggcggtgggggagaagctgcgagtgggcggcggggaggggcggcgcgcgggcggcgacgagcccacgaggcccacgaggcagaggaggaggcggcaacgacacggcaaattactgaggatatcaccaacgtccatataaacaagataatcaccaggcaaattattgctgctgctacttcaccatttgtgcatttcctcttctactatcttagctgcagctcgcacgctttgagtacgtgcattgttcaactgccatttctctcctcaattccaaaaaaatatattcacctttttctcattcgagctaaaccatttcgatcaatggaattcggacgatctccagcccttctactccttgttggtaagtccgagaaactttcaggccggttaactttaggctgttagcacacatcttcttcattcttcttttttttttaacgactcgcacacgacggtgtgaagttctattgatagagcaggaaaaaaaataaagattacaaccctggaggatcgtaaccagggaaaaaaaagaataccaccactcacacaccgacatcgccaacacaagcgtccaagagaaggctagcaccggagcggccgccgctaagtgtgaccgaccgccgctaagcgtgaccgactgtcacgcccgaaaattcactagtaatttccgaacttatttgtgcataaaatcctcgtccaggaatcagccgaggtacacaaactgacaatttaatatacaaatccatcataataataacgttacacacttacaaaagaaaagaaaacagcagcggaataacggtctagcgatggcttcagctccactcccacaggcagctcaactggggtataagccaaacgtcttctccttctggatcctttttcttcaactgaggttgattaattattgcaagaatgagcatatgacatactcaacaagccacacagcaaatatgcaagtgcacaaggataccaaaggatggcataatataggctcatttgcaaaagcagcatttagcaaacatttaagagtaataaaacagtagagtactttaatcattaattttaatcaacactgaacaacacgcccatgctgctcaggcccaaccattctgaacaaccatacccggctgtacagatctaactccaaaccaggagctaagcaaattattaccaggtataacatccataattattgtgagaggtgtgagactaatcacgaaaaacattgctcaacccgcccataaccgcgggcacggctattcgaatagttttactctggccagaggtgtaccactgtacccacaagacacagcctcaacatcatgtctaccatgcgtcgcgatactggaaagtacccgaatagaggctgtgacaataccctctgcacaacacaactcaccacagtgcaccattcctggatcataatcacccccttataaaacaaggcatggactccccagcgacctccgtgggcttatctccgccacttctcagtctggtgctccgcaatgaatcatgttatacaaaaggtaaagccgttgcccacgctggcttgtggttggcacggttaatatttcacaacagtagctcgcgaaccggtccttaattgccatgagcacgattctcaaaaccatgtgctcacaacccaccattatcaagtttgagttggcaagtaattaattaaccaatcacgattgaccatcgtgaactatcattaagccatcattaaataatagtgagtcataagttatcccaatagtgtgctaatatttctaagcatggctaagcaatcatatctaatatctagctaaaccaatatataaagctcaactagtcaagttataataacccaaggtatcaagtaataaagtaatcaatgcaaacaggccataacaaaggaatagattcacaccacccagtgacattcgaaagtaaatgcacagttgaaataaatagagaatttaaatataggatcaacatgctcaaaggattgtgtttaggatctgtgtgacttgccttgcaataatcggtcttcaattaatcttctgaacactcccgacgcactcacgaaccttcgcaacgacggaaacgacaagctaacacgcaaaacgaagaaaaagactaataaaaaccaaataaacaatacatataaagtaaacaaacatgtagatcataattttagatgaattatgagacttgaacggcctcattctgacttcatatgaatttattatgaattttacaagattaaatctaattaaagcccatttaaaaagaattaaataaatttaattcaatttatggataattttaatatgtagatctttattttacacaacttttgtaacttgaactacattaaactgagttacaatgaattagttatgaatttttaaagattaaatcgggttaaaacacttatatggattttaattgaattatgacgcaataatgaattatttttgaaaagaaaaagggaattattgcgtcatcggctagggtttgcggtgaaccgggtgcacggcggcggctcacgggaacgaacggccgagatcgatcctatccaaaacggacggccgagatcgaacggtccacgaccgggccacgagagtcgatgacgacgacgtcagcggtgatgtcacctccggcggcggctcgggcgcacttgctcgccggcgaacgacggcactacggcacgaacggagggcaccagcacgtagagagcgacgcggcgaactcaccgatgaccaaagaagcggcggaagatgaacggacggcggcggcgtcgaggaaaaggcggcggagtccttcggcttgacgacgacggcgatgctccggcggtctacagcgacggcgaaggggcggacgaggacggcgacgcgacggcgaccacgatggcgaccttcccgagcgacggcgacgactgaaacgatggcgaagcacggctggagcggcggcaacgacggcggctcgaggttacacggcgctagggcgctaccgacggcgagagacgaaggcgagggtggcggcgggtagaggagagcttggggatccttatataggggttggaaggcggcggcgaaggcccacggcgaccggcgacgagaaggaaagtctagggttaggggagagagatgaatccgattcgagatcgaatccacaagtttccaaaccgaattaggcgatgattccaaaagaggaaaggaagaggagatctcaaggatcatttgccctcaatcaatttgaccggaaatagagaggggcggcggaatttggaagggaagcggcggcggcgcagctcggctagggttcggccaggcgacggctggaggaggaagacagccctaacaggtaggccccacctgtcagcggcaccgagagagaaggaagcgacgacgggctgggccgactgggccggggagggagagagaaagagagaggttttgggccggctttcggcccaaagccaaaagagactttttaaaaacctttttcaatttaaattattcatgaaatgcaattccatttattaaaaatactttcttggctcaaataaatccagaaaaatctaggaactaaagattcaagagaagtatttaacaaaattttatctcgcccaattttatattgagatttagcaaattaaaaaaaatcttctcttttaggcttttaagatcatttctaataattccttttaaacaacaatttataatttaaggatttttaaacaagaaaagctcttaacaattataattagatcattaatgatcaaataattactgaactgttctttgtatcatttaggaattgagcttcgaaaaattcgagaaaatttcagagagtatacttaatcatggagaatttaataaaaattaaatccatccatgctttatatttaggaaattttatttcccacatttaacttcacttgtaaattaatgaacatttaatataaattctaataataatttattaaataatttataaatcctgaaacaaaaatcaggatgtgacaccgaccgtcacctagaccaacaaagggacacagacgagatcgccccctaggggatgccaaaacaacgtcttcaagaagagaagcgacggaaaaaccaccgcccgtccgtcgggactcaaaagagccaagactgggctttcgcccggctatcacccttgaggggtgagacagcacaacaacaccctcaggaggatcgttgtcggttcggccaaggccgcactgggttttcacccgccgctcaccggctgcgaatccacggctgacgcaccgatgcgccaccaccacacaagctctgccgacatgtgggacccctgcaccgacgtcccccgccggccagccttcgtgcgccgaagaccacgccatatccaccggcagctcctcctctcacctaggtcgcctcctccactgccggccacgcctctcgcgccaagccggcctccatctccgccgcccgcgcctctcgcgccgagccggcctccgctgccatcggctacgcctctctgtgccaagccagtctccgaccccttcatcgaacgatgccgtgccggccagaagcagctgtttcccacgccctcggctagccgtccgaggccgtcatgcctccggtgaccgcagtcgtggtcaccaccaccacagccgctgctgtcgaacgcccagccacttgcacccgactcattcttcaacaatgttgtgtctcaatgtagggttcctatggtcacagctgcagttcggcgctgagtcagctggcacgacggtcttcacgctgcgcaacaactgcacctacaccgtctggccgaccaccttgtccggaaacaccgcggtggccatcgggggtggcggcttcgagctgtcgctcggtgccaatgtctcgttcccagccccggatggttggtccggccgcttgtgggcgcgcacggactgtgcaccctccggcaccgcgtccctcgcctgtgccacgggggacttcggcggcgttgtgagctgctccctcggtggcgcgccgcccgtcaccctcgccgagttcacgctgggcagtgccgacgggaaggacttgtacgacgtgagcctcgtgggcaggggcagacgggggagcccgcgcgccactcctccccccgccgcccgcgcgctgctcctcgccgcccacccgcagcttctccccccaccaccgctgcgtcgcccgccgccgccatcaccgccgccgcgtcgcccctcaccggccgctgacgccctcctcctcccgctggctgagtcagagaagggagagagagagatgaggaagggagagaagagggggaaagagagggagagagaagctgatgtggcagcctgacatgtggggcccacgtaggataaaaccggggtcaaaaccaccgaagaacctattgtggcctgttttgatagttgagggatgctagatacttggttttacggttgggggatgattttgtaactcgatgacaagttgagggaacttcggtgtactttttcccgccaaattatgatgcaaacaggcccatcattgatctcgccggagcactcgttgtttgagggcattttgctatcttgttcaaatagagaatatggatgttggccaaaacaagcaaaatgacagccacatgtattaatatgtgaaactagctagtttgttggcttacgtgtgatgcatgaggcatgcaaatatgtgtgtgcccagctatatacacatgcatgtttggttaatatatatatgcgtatgcatgtatgagggcaaaccaaggaggaactgggagatcagtacgtactgcatgcatgcagtgtaccgtgtaagtgagaccgtcaaatctatctattaacttattagagtaatagaaaaatgagtctccacattcgctctcggcatataaaaattttcatattaatcggagaaaaagaaaaacatagtccatataaaagtacaatttagaaatagctgaaatttgaattaaaaaataaggaatatcggctatgctatgaatatatataatctttgttctaaagtacttttaatcataagtgatttatactgtctcggcgtactgtccgatctatcccaatcacttggtttaaacatatttcgaagcatagattgtatattattgatatctttagccgatcaagtagatctaattatttctttgttatatacttcactgccgatctgatgcatgatacatcgtcttaatattaaacgatacgtcattggcaatccgtccgatcggctatcgtttatagatttaactttgttttctttgtttttttgttggttgtaagatcaaatcaactggcacaccctgaacccgaaagcaaattaatctttgaacctgcactagagtaaagtaaatctctcagatcagtgtgtgtttttttatcaacaggtgcactctctccatcatgccggagtcgccgtgccaaccaatctgttggcaccactcgcaagtctttgtcgagatcgattccagccgccagtgaggccttctcttcgtcaccccggagtagccataccatcagtccatggtgcactctctcttcgtcatgccaagattggtgccgtccatccgtgacgtctcctctctgtcacgctgagatagatgccgtccgtctgtgacacccattttcgctacaccaacatgatgagatgctatccgtctgtgatgccttctccccgctacaccaacggtgatgtgatgctgtccatccgtgatgtttcctctccgccgtgccaagatgacaatatgtcgttcatccgtggtgccctctctcttgtctctttgtcgagattaacgccactcgtttatgtattggagcgtcgctaatctacatcaacatgaagcaagaacagtgccgtttatgataccaggctatctcccgggtgattgttccgcgcgcgcgccgggagggggggatgtgcctcccctgcatcggcgcgtctccgggtgccgctgcgggttacacataatgtacttaaggtgtggcagtacgatttcgtactatcagaaagaacaagtactccgagatttagtggaaagctaataattgtcttttaacacaacatcagtaatatttcaacaaattatcgaacaacaagcaccagtggaatttattcggtgcagggaccacatcattgccttcaacctttgccgccattgccatagatgacatatgttgactaattcttcttggattttagctctgccactctttcctctgttgccttcagagcttctccatatatgctcaccagctgaaaagcaatagagtactatgagtcatgacataacagcgttgctttcatctacaaccagaaaagagggagaaaggttatgctgtgatttgttcttaattactttatcaatttcttcacgggttattatcagtggtggggacatcgctatcaagtttccaagaaccttaaccatcatgccacgtttcttacactcctgtccaaatatttcaccaacacctgaaaaacgccataaaaaatcattagaacttttactttgtcagcacataccttaacccacccaatgcaattctagcaaggctcattggtacatcacggccttaataattgacttccattcacgtattcagatgaacaaaatgcagcatctagtgctacccatacaaatatttttttttgagggaatacccctacaaatatagggactaaatctgactatgttataaatctcatgtatattggaaattaggactatataagccaccattccattcggtaacaccaacaccaatagccccaaaaccggctaacactatcggttcgtggggcctatcactgccggattccctgccagcagtgggctggcgacagtgttggctgcgagtaacactgtcggttttttcacatgcagtgataatgtagagttttgtttcggtccaataaaaagtacctcggtatcggtacctcacggtaccatccaacgatcagaaatgatttggtaccgtgaggtaccggtacctcgaggtactttttgttggactgaaacaaatctcaaatggatatcattgttagttcggaattgatagtcctacccggcaccgtttggacactgcttatcactgttgataggtgtcaagaaccgacactgaaagcccgcctacaaattaaaaaaaaaatacagtcgggcggtcaaggcacgggacggacggctcgtggcatgaaccagcagtgatacttacttccgaaatcaccgcatcaccgtggccccaaactaataattgaggtccccatatcactgccggttcgtggcatgaagccgcagtgatacctactatcactgccggttcgtgccacgaatcggcactgttgtatcattgcaggatcggatcgtgacacgagctggtagtgatattgttctttggattttggacgggattgggcgcaagaaagtgtagaaccgacagcgatactttatcactatcaatgctcgctgaatcggcagtgatagaccattatatggaagtgaatatgctattgatcatatacatgtgcacataccaaaagataaagggttaattagattcatgccattataatttttatggctttgaaatatgccaatattactcaactatttgaaatcataccattgtaatttaacagttattcgatatatgccaccgcttaccccttcaaaccattttctatttttttccaaccaaattacccttatctctttctttcatccctattctcctttttcatcttctccatgccattacgttgttttttgtttgcaaaacacagaacacagttaggttttaacacagaacacaattatttgattattatgcgtgtggcgatggctgcaaccttcagtggctctccctcctctggggcttctttcccccaaagggcgttggcgggcactgatccaagttgcaacaagtcaatgtttgattcatgacggcttgatgcgggtggtcttgacttccacagtcttttggtcattataactccaacccagcatgctcgtggcaaaaaggcccattggtgtggagtcatggtgtttccaagtctgcatgaggaattggttgttgacgagctagggtgttagctttaggttgttttggtttggctgggtcttttatagatgataaacgtcaattgttatcttcagagggtcgcctctcttttgtattctcttctttgtactccccgtgtatcttctgctactatctttcagggctcctgcgcttgcgcaggtaaagcctgccctgtgtacttttgtttgacgcaatatattcaggaggtggggaaactccccccaggtgacttagtaaaaaaaattattatttaggtaacacacataacatatttcctaccctaatcttaggccctatttgaaagattagcccagggctaattttgagagctaatgtttagtcatgaatcggtaggctaaacattagcctagggtggtatgtttggatccatgggctaattcaaggctaaaaggtggagagagagtaaaaagagaggagagagatagctgctttttgatggtccccacacaaaattagccccattaataccccttggaggggctaatattttgagaggggctaattcacgttagcctcaaattagcccacatgtttggatatatacttgagggctaattcaggcctaaaaggtgggagctaataattagcccatggaactaaacagggccctagttgttcctagttttttgtcgtgctaattaaagcgtagtgggtaacattggtgtaatgctgataattaaattacttaattataagtgcttgtagtcactagtgttacttaccccactcaaaagggaataactcatatggtgatttgttatcggtgaactcagttgctatcagcaatcctacaccacgtgtctgcatacaagagcacacataagctatgctgtttatgtgttcaaataagagaccaaaatcgtgcctgtggtaccagagcaccaggagaaacatggaaatatttcaaaaatctaaacagattaatacctccccaacaattggacttccagctgcaaaggccttgattccctcctggaacctttgagcaacatgtgtgacatgaccaggaatatctctttccctggtaccagtaattttgtgaaacattcatcagaaacaaataaaacctatgtacctacaattaatggctatgtttcgggaatagaaaagtgagtgtaccgataaattttcagcgcctctaaagcaacagcacaggaaacaggatggccagaatatgtaaagccatgagcaaatgtacctgtgacaaaagacaacaacttcatcatgtctttgtttttggactacaaacaatgagagagtagctgtgggtaccaaaatttttacccacaaacaataggatcggttcgtatagtagcatttaacttaccgagcttgttactatgagaatgaatcacatctgatatttccgggctaacaagtatcgctccaatgggagcataggcagaagaaagagcctatatcatggtaaattaagatgatcagtcatcttgtatcatgtaacaaatgttaagtagtacttgtaatttggtactagatagcacaccttggccaaggagacaagatctggtttgatgttatacaaatcagatccgaacatggttcccaaccttccaaatccagtaataacctagaatggaccgtaagttcaaaacttttgccctaaaaagttaattgttgtttccccattttatgtttgtctcgggagtaattttatcatctttgagaaggtaccacattttttatgtaaaacttgctaccttcagataatagataaatttacctacatgtactttttcaaggacagcaaaatttcttgtcttggtaagatataatgtaaacatacctcataaaaaataataatgaaagcatacctcatctacaataaaaaggatgtcatacttcttaaccactgcttgaatctgttgacagacaacaaaatagcacacaatgaacatgcataactacaattttgttgttcagcgaatagtaatacatgaacactagcaactcagtaaaccactacagttttgtggaactgctagagtgtaatgaagtacaaaaatttcagagtgatcgagcaactatcaaaagttccacatatgggtaatatatcttagctcaatattactgtattccagaatgcatgaagtaaatgaatacagttagtccctgtttagttccccaaaaacttttcaaaaaacatcacatcgaatctttggacacatgtatggagcattaaatatagataaaaagaaaaattaattgcacagtttgcatgtaaatcgcgagacgaatcttttaagcctaattagtccatgattagctataagtgctacagtaacccacacgtgctaatgatggcttaattaggctcaaaagattcgtctcgtggtttccaggcgagttatgaaattagttttttcattcgtgtccgaaaaccccttccgacatccggtcaaatgttcgatgtgacactcaaaaatttttatttcaccaactaaacagtcccttaggttttctaaatggaaatgcaactttaatttatagtatgccaatccatccaccttctcaaaatatgtctttggaggaaggataacaccaccagcaccaatcacaggttcagcaatgaaggcagcgatctaaggggaaaaggaaatagattaggtcggtaaactccggtatattataagttttgaggtgtgtcaagagaggtataccgtttctggtccttgtttgaggataagattctctaaattatcggcaagtctagttgcaaattcttcttctgtctcacctgtctcccacaaaaatcattaatttcatcgaaaaatgcactctgttaatcataaataaaaaaataagtataccagggagatggaagcgccagtagtgagggcagtctgtgtgcagaacaaaacgtcctggcagatcaaaatcctgatgcaaggtaggaagactaaagatgcagaagggattagcaaatgtgacttcaaatatgaactagtcatttcagtagttaaatttccagtggataaatttgctggctgatttttcaataggactatactcaccctgatagactagctgatatgaatgttgttccatgatatctgcagtaagaattaagcatgccattaaaagtgattttgtagagataaattttacagtccgtgagaggtataccaaaattttagtacctcctaataccataggtacaagtatcgtaaaatcactcttttatagaagttagctgggatggatttattcagtgacggatctagaaaaaaatagtagtggaggctgaataaactacatcagcataaatcgaacctccagtccccacatcctatggatctatagaaaaaaaaaatttagcgggggcttagggggtctccactgtcctgggggcggtagtggggtctcgagacccctccgcccccattgtgaatccgcccctggatttatttggtgtctatgaacattgctatctagagagagttaattgaaagtagctagccatggatttgtaacatggagaaagtaaacgggaaaaaacatgccaatagatctagaatatatagggtgaaactagctaggcatttcttgttttaaggaacacgagtatatatgtagcttacgattgtgtccgtgaaatgatatttttcttctttggcctccccaatgcattgttataataccatactatcttaacctgcaaaagaattcgaaataagcattatattctacgtgtggaaaacaatggcagaagagtaacaaatcaagaaaaagaacaaaatatatcagtcaagattaatctatgtgtttattgtgactcttcaatccaacacaactatacaaagggcataaacatgatgaaggaaagaaattagatatgcactgacatcccataaaaaagttcaaccaacaaattaaccaagcagtaataatatagtagatactcttctgatatactacctccagccggatttagtcgatgttttggacaaccaaattgacctacgacaattagttttatataccgagcaattagaaacatcacttcgttatgagccgagggaaacattaccatcatgtaaacatgatgatgttcgaactatgtgcaacacaatgtaaaatttacttaatttacaatcttccctatctactgttatgtattccaatccttgagatcacaaaggtcatgcatcattccctctttcattgtatggaacattaataaaactttcaaggatttaatttgtactttatgtatacgggtatcaataagagagacatactatcagtagtacttttggaagaaacaattcacaccatcaataatgtaacgtaaaatctcaatcgagagcctctcgttttagttgtaactagcgatgacatcacataactggaagagtcatacttaagcataatactagtacatcaagccagtaaaaaaaaattcctaccacctatgcgttaaatagaattttcttttaagttactcattcgatgtacgatccgattatattattgtgttcgtaacaattaaatctttacaacatgatctcacttgattatatttgttgatgaaaaattacaaattacttttttaatatatctaaataatttttagatttcatcaaattacttcttagacatataaaagtgaattcaataaagcttaaaagtaatttacatatattatagaagtaacttaaaataaaagaaagtaacttgtcatgacattaaaagtaaatctattgtgggggtaaaaacataagtctatctagaaattaaatttaatcaatatattatagaactaaccaataaataattgttcactgaatgtctaaaaactaatttaatcatatctaaaagtagtttatatatatatatatgataaaattaacttacatatataatttacaacctaattattttttatcataatataattatgtaagattgctagaaagatttaattgtaacgaacacaatggtgtaaatagatcatatgtgtaatcagatcatagatcagataaataatttaagagaaaattttatttaaaatttcaaattttccctagaaagtatgtggggtctgtaaagtaacagatgaaattgaaaaagtgagaggtctcgatttaagactaacacgctactgcactctacctagacgcgtcctggttgggcccactgcatattaatgttcattttaaaatttgtgcaagcacatatcccacattttaactactaattcacatatatttaacaacctacataatttctaccatatatacttgacactaatatggattatatttttcacaaaaattcgaatttgaaccgcaaaagtatcagactttaacccttgcattctgatctttcttttaactgatataatttttcacggtgcaaactgcaggaaatggctggtactttaacaataatattacctgagagtcatttgcttctgaaccactgttcgtaaagaacactttgcccatttccctggcagtaaacatgctaataagttctttcgcaagatcctgcaagtagcagcaaacctccaatcatcagtatttacaagttttttttttgtttgcagaatgactaagtcagtcactataacattttctcatgtagtattaatatctgaaaaaaaagaaacaatacaaataaaacaacgattgatgaattaaagatgcagaatacatatgtaccaaagaaggcctggttgtatggttccaaaaggagtggtagaagggtaacttgtttaattgctccgtagcagctttgactaaacgaggctcactaccacctgaaaatagcatgcatgagtggttaatgcatcagcgtttataatcagttattgatcacttcactgctccctctacccttgatcaataattagttcaatatcattttttaacaatggaattagttcaatatcaatacgtcgattacaagataaaatggtactacattggattcatatttaaaacttcggctggatttactacctggaacaattcaatttatccacttagcaagcctcctgacaaaacttcgtctgaatttactccactaaaacatttcaaccggtttaatctactgtaacgccccgcttttcgcgagacgttaaaagctaatttactgaaaatcctaattgcgaaaatttcgttctttgagtgttgaagtctaagttgtgccaaagatctcaatttacatccctcctttggtccatctttgtgctatcaaagatcgtctcctcaaagtttccatcccaatatagtcccgaagctcgattccttctattcggaatcccctcatggaaccccatccgtgaactttgtcaaatgcccgaaccctaactccgtccaaggattcaccttcgcgtcataaactctctccttggttccttcaaaccgattctcaaattcgaattcaacctctcaggttttgtttcatctatatttctctctgtattggttcgtcaatctacccttgttttctttctcgaacttctgacccaagtctgaatatgcaaatcgagatcacttccacccttgaactctaaaccccaagattcaatccctttcgccttgagttctccccaaaatgatttccgttccgaaataatctcgaagtccgaacccttctatttagacttccctccaaaatccttacccacatatctcgttgagtagtcaaactcaaactcccaagttacactctctttctctaaattatccatctcactttgactcgtctctgaatattgttcccttccttgactccttcctattctcccgagaccgagtatcaacctcgaaactcgaatccagaccccaaccctaaaacctcccaattaaatctctctatgaaagtctatttaacctccctcataggttggattccttcttcctttttccggtccacctcttccttctcttccatcccatctctctgtgagtctcgatctatctatctttcgatcgatccatctatctatctactatacctatctatctgtttatctatccatctgtcaatccatctgtctatccgtccctctacctatcaacctacctttctgtctatctatctatccatggcattctaccgctatctcccttgttccatttttgaataatgatcttccctttttgaaatcctctgaaataatccttcgtgccgccaaatataaatctatcccaaaaatatcaaaattcccgcttttgaagcccttccttgacccctcccttggatccaccttgaaccctcgtgtacaaatatacaaattgaattcaaattcaatctccacatcaaatttctctccaaatcaaaccttccagtaaaagtctattttgcctccctccaactcgctcgggccgaaaccatcctcggcccatcctcttctttcgccagcctctccatcgcacgtgcgccgcacgtgactccctcagagagcgccctctctctctctctctctctctctctctctcggcgtcgcttcccgccgacgctgcccaaaattccggccgccgccttcgattcccgcgcgcccgtgcgcgtggctgaccgcctgggcgccgccatcgccaccctcggttgtcgcctgccccgatgaccaccgtgtccgcgcttgccttcaaaccgtccccgtccttttgcagtcgtcgccggcgtcatcctctcgggcccggcgccccatgccgcatgcatccaaaaccgtgaggcgcggctcgttctcatccctttcctcccaaaacggaaggagcaaagctccctttcctcctcctcctcctttcgctttttcccctcccgggtagcgagctccctgcctccactccttggcttcttgttcaaaaggcagagccgctgacgccgctgcagcgcctcgccgcccccaccttgaccgcacccgctcgccccgcgccaatcctcccgtgctcgcggttcgatttcccaccacacgatccaccgcctccaccaccctttgcatccttgccgtcgctcgttctcgcggcgcccatgaacaccagccgagcgccaagaaaaccgcggccacctcgaaccgaccttgccgctcccactctgtctctataaaacccaccccctgtgcttcctcccttccttgcttcgttccccccccaagcggcggagccctgccgccatgggaactcctcgccgtcgcgtcgagctccatgtccggcgacatctcgccgtcgcacggtccgtcctctgccgcctcctccctcaacctcggtcgccgtcgcgcggccaaccccggagcatcgccaccgccgcgaccaagggcgccaccgcacgcctccgttcccttccccggcacgcccaccgtgacacgatgccgcctcggcatcacgttcgtcgccgtgcgccgctgctcgtccatgcgccgccatcggccttcccatcctcaactcgccgccaacgccgttacctcccgtcggtgagctcctcacctcccttttccgctgtcccagcactcgcgtagctcgcgtcgcgcgtgctctgtttccgccgccatgcgcaatcgagagccgccgttggcctccctctcggcgactcctctagccaccgccgttcttgagttccctctctacctccccaagccgctgtttcagccgccggcctcccctctcgccctcgcgttgcgtcgcccgattcgctgctgccgcgctcggccacctccgctgtgcctcccctgccgtcggcctccctcctctccttgattcccggcgccgccaccttcctcgggccccccctcgacctccccaacccctccccctggccgccgaccttcctcctcgctcccgcgccgtgccgcccctcccgccgccgcaaggcgccgccgcgagccacagcccggcgaccatcgggtcccgcgtcaccgcgtgtgcgctgcaaccccataccgcgtccactaagcctgagcgcgcgagccgcatcccttcccatcgcgcatccacgtcggcatcccggcgagcttcgccgccgccgccggccgtcgtcgcgcgttgtcttcccaatccgagccgtggaatcggttcgccttgacctcctctagccaccggtgttcgtcgctcgcttcggctcgccgccgttcgccggattccaccgcgcaccgtgagccgtccgatgccattcccgccccccccccccccattttctctccccatccgacgtggctgcccacgtggcgttgaccgggcctgcccctgcccagtcagccggtcagccgtccccctccccctttctcccctggctcgtgggcttggcccattggccagccttcctcctcggcctaacaaaacaaaggaagtttacttttactccctcttccgagtccggtgcccacacaccgaagagctaaaagtccgcaattgctccctccaattgctcctctctctctcaccttcttattggccccactcgtcaatgagtcaaagataatcttgagaatgtcttttccaatattccacaaatatttctctcttctataaattcagtaaatcattttatcttatttcgtgagttaataaatcttttttcccttgatcccataaatcaattctctattccaaaatttcatgaatcatttccttataaatcatttcctttggtcccgcacgtcagagacggtcaataatattcttgagaatattatttctataaatttcatgaatcaatctccccttgttccacaaatatcttccttcgccagaaattccaattaaacttccaaaattcgtatctctcgatccaatcgtccgattgaccccgttccacttccagtatttccgtaaaatcgagatctatttaatggcactattatttagtctaaatagggtctttttcttggtctcttgtttaggtttttgtttgtttgcgcatagttgcggttaccggattttcgtcgatcgtggatttctcgaagattcgtgaagctcagtgaagaccttgagcaaggcaagccacctttgaacatattgagcctatatttgaacttaattatattgctcgcaaaatattatgcattgataggattgcacttaatctgtttgcaccgtctgcaaggcagaccggtgggcctacccaacttgttgcatctgatccttacattgttaattgttatatcatgttcccttgtaaccatctagctgcgcctcgatattcgtgcactctgtgcgagtatcgacggtcgccttcaaacttaaaatatgagtaacttcttgggtaaaacttggtttacaaaagcttcggaaaacccgacgcctgggtcggtgccttgtgaaagaaaatgagttttaaaaataaaactcgcgacacaaggccattcctaggcggaatacttgtgcggtcgcatctaaggaccgattcctttggaattacattcgagcatacaatagtgcgaccacacgggtggaatgggacgcccctagctgagtaaattgctaattgggggagccttgatgccgagagacatgtgaattcaacggggtggtgtcggggagaacccccgggcttcctagcacagtatggtctgggacctaacctgttgttggtctgggacccctctcgtcggcatatggcaaccctgtgtctgctctcgaaatgccttgtaatgaaagcccttaggtcaccagacgtggccgttctatacgggctgggtgattcgggttagtaatgtcgtgtgggtaaagtgtaccccctctgcagaggttaacaaactgttcgaacagccgtgcccacggtcatgggcggatgtgaggtgattccttagcgtagtttttgttttaccctgttttatgaaaagggtgttaaggtttgggaaacctaatgcttgggaagcaattagctgtccgggggacagcgggaccgggtgtccctggaagtaattggtcgtttggggaccactattatcgggaagtttggaaaattggtttggtttgggaaaaaccagatttgaagccaactctgggagttgtgcaaatcttgataaataaatttgttacttctcacctcccgaccgagctgagacttgtctcgctctggttgtggaaagcacacacttagattgttgaaaacttgaaaacaaaactgtttgcaaaataacagccttcccttgaagcctgcattaaccacctaagttcccctggcttgctgagtacgtaagtactcacccttgctctctatataaatatagttctgccagctccgaagatgaagttgaagtgaagtgaagattagggtttcgtcctagttccctgtcgttgcctgtggcgttgggtgttagtccgttggttggttccgctgccgctgctgttgttggtgtttgcctcgtctgtgtcgccggttgcattctggggctgtctaagctgcaacctaagttaaggtaaataagtcctctattaattataaggatttgtaatgattcatgtttgtcaccgtgggtaccagcgctatgtcctgggactggtactgagatcgcagtttcgtaggacgcggttcaagccgtttttctacgacacgctcctgtcaggtgccgttgtacggcggtaccagattggggtgtgacatctaccctgatgagatttgccttttttcccctccccgtacaaggtgaatttgaagttcagaattttcatggtagcaaagaacagcatatatatatataggccgtgtgaagttccaaaataattcttcaaactaccaacttttccatcacatcgaaactttcctacacacataaacttccaacttttccgtcacatcgttccaacttcaaccaaacttctaattttagtgaactaaacacaaccatagcatatgtttgaaaattgtattgaaggtttttttttcatgaatattttcataggttaggtaatctatatactagatgaaccctagctaggtatacacaattaaatgaaaataatggtgaagaacttttaaggtatttttctagcgctaggtgctaggcacgcggtgacgcttcgcctaatgccagcgtgcgtagacgacgcctagacaatttattttcttgatgggtagagttatgtcatgttaaatggaagaatttgacacgctgaaacaaagaatttaacattataggccatccatgagttctatgaccataattcatcatattccatctttaatattctccaacttttatgtataaaccaaaccttaaaatgctccaggtgagaaaaacacgcctatacacaaaatgcttactccctccataaaaaaaaaacagaatctagaactgaatatgacacacctttttagccaacatttgaccattcatcttattcaaaaaatttatgtaattattatttattttattttgacttgatttatcattaaatgttctttaagaattacataaatatttttatattttacaaaaaaaaaattgaacaagacgaatggtataaaaaataaatagcgtcatacattaaaatattttacatccaatattagattgggtttttatagaatagagtgagtagttgctaagcgaggcagtgatgctccacctaccgcctaggcaccatctaggtggagtaggcatggccttttaaaacagagtgtactccctccgtcccaaaaaaagacaaaccctgggtttccgtgtctaactttgactgtccgtcttatatgaaatttttttataatttgtattttcattgttgttaaatgataaaacatgattaatattttatgcgtgacttgtctttttactttttttttcataattttttcaaataagacggacggtcaaacgttgggcacggaaatcaaggtttgtctttttttttggacggagggagtatgttgttatcccacgaaacttgaactgaacactcaacttgctggtgaggaaaaaaagacaaatctcattagggaataatactcgtccaagtgagcaagaatgctccttctcggtcgcgcgggggagagaaaaaaaatcggttgctagctcccccttcccctcatcgcatggcaccagcagcctctctgggccctcaccacatgtccccgtccccacccgtcacttatccacacacaaaactctattgcaataaattacccacatattttggaaaccttctattaaggatattccattgcaaaaaaaaaccccacatattttagaaacccctattaagcgaattcgttttattttttgttccaccacaaaatattttaactagtgtattataatatttcactatgtatggatcaaatgttgcagtgaactgaaacatttgattcgctatttgctgaaatattgtttttatataaggtgaaacaacatccaatttaaacgaatgaaacattttcgatctactaagtgaaacaattctgatataccaggtgagacatcgtgcaacatttaaaaataattcaataataagctaattttttttcatcggaatatatccatatgtgtggtcttgttttgaagatttaattgcaacaaatttaatggtgtaatcggatcatgatttcgataagtaatttaagagaaaaatcagtttaaagtagttttgcacgtaaatcgggcatgttgacgtcaacgcccgatttttctccaaactgatcggacgcccgacccggtagactcgtccaacttttttttttgttagaagttgaacggacaaagtagattgttagctggtagttaattagacattttcctattaaaacatcttatacacatacctaaagctgtagacaacaatcctgcaagtgcatctagatacttggtcccgttgacatcgtaaacgtaacatccctgcatatcaggtccaagcaatacgatgcaaaatatcgttagatatcagagcgcaaatttaaataaatttcactgcaagtttttttagcgtttcattttaactttatggggaggggtggggacccggcccctgccagcccctccatagctcgatcctgtgcgcatatatacgttacttcacatatatacgtacgttataataaaaggaagggtacagatcaaaatatttcaaagaatgctagtacatcagttagatgacgtacgtctttagaaaatgtaatgtcattattaaaatttaactattactactagtttgcataaaaatatatttggattgctccaatgaaaaatatgatcgttatattttccgtgcaaaatactctctacgttctaaaatatagtaacgtggtcccagatgaggcatcatattactataaatttgggtgtactcagattcatattattaggatatgtctcatcccatgtattagattgttatattttgggatggacgtagtatatacccccaatatgtgtatataaaattttttaacataacggaagaaacttaatttccttgtgtgagagaaataaaattcttagggatacaattattccccaccgtgtacgtacataaaattgacacggatagagagaggaggcagaaacatgtttgccacattaattaagtagaccgtcaagttgaggcggagttgactcatttggagttgacattacgaaacaagccgcggggaggactattcaagctgcaaataattggagatttttatttttatttgtagatcggtactttgggatgtcttgactacatgtccttgaaaccatgtttactttctctaataataatcctcgaaatataggatgttgatctgacactggaaatctatccattaccttaaaaaaaggggaaaaaagtagaatgtaagtaaagcttgctcaatgatcttgccttcaattaattttagcaccccgccaccattttattctttcgagaactgtcatttatttttgttggatatagatataataacagtagaacacacctcattgtttcgttgcactcgaagacatatcacaaaataagccaccgctactacagatttgattttcttttaaggggcatttgcaaatttgccaccggtttttttaatattgtaaggatgaaggatgccactcgaatgatagttctagtggtatttttataattttctagtggcagttttgcaataacgatttaaagtagtggtaaatttgcaattattcttttttttaaaatgagggtctctctaggttataggtgggctgtaactatacccgcatacaaaaatcggacatccgagaacttcaaaggttttatgtcacatatggccctctaagaggcctgccccttaagagcatgctcacctctccaaaacgccaagactcacatgcgttccttttttctacgaaattaagacagtaaggaaaccatataccgttatggttttaaagatgttgcacagtaatcccaacacatgaacaaaaataaagatttttcttactcatatgaaaagtaagagttaaaagttgtatgttaaaaattatcttatcctctggttagtaaaaataagattacaagagaaattaaaaattaaactgagtaaaaacctcagatctctcaataaccagtggtggtgagatagcggtctgccatgcggctgtaaacggtgcaagcatggcatgatccttaaccctaacaggataaataaataaatcagcaaaaaaaaggcaaaaaactagtgtaaattaatgtagtgttccagtactagttgctaatgaaagggaaaatcgtgtagagagttttgacactcaagctactagccatgcgatttcttatcatacccatgttcttcagcagagtcatcagctggcacctgatcagagaaggcacctgatgagtactggaggaggccatgaggagtcgtcatatataaagatgaaagttcgcttataatgtctggcgcactgatcgttctcggagaaacacacgaggagatggcatgggtatatataggctgtgttcggaattctcagttcacgacatgcagcgcacgaaaaactgagcgatccattagcgcattattaattaagtattagctcatttgttttttaaaaatggttcaatatgatttttaagcaactttcgtatagaaactttttgcaaaaaaatacaccgttgagcagtttgaaaagcgtgcgcgcggaatattccaaacacaaccatagtaggagttttgacattttgcttacaccatttgaccattcgtcttatttaaaaaaatttagaattattatttattttatttgtgacttactttattatccaaattactttaagcacaactttttgttttttatatttgcacaaattttttaataagacgagcggtcaaatgttagattggaatagtgaatatcccttatatttacgaatagaggtagtagtatatacttatcgacgtttgatatcacgactacgttatttagatgatatagggatcgtcggtactagggtatatacgagattgaggttaaagagatggagacaaggatttttatacaggttcgagccccttatctgataggtaatagccctatatcctgttggccgaagccggtgttgctcatttattcatcttaattacaccagtataataattgggataacctatctaactgtcatcgacttggcggctagataaccaactcgtggtcgatgacagggtagtcttcctccttgaatccgcactcggcgagatcagagatggcgctagatccctttgctggtccccgtaggtaccggatggggtatgtctaggtttatctctgatatcgatatccggcgacgtgtgttgggcatgttggcttgtattgatcttgtggctttatggaatgtcccctcacctcttagggggcttgtatttatacccatagatgcccccttgtccaagtaaaataagggagataaatatggatacgatctgagtagtccttgttattttcatatagaactctacttgtcattccttatccggaactctttctatatacgaggtttgttttataagacatggtatgtggtgggctccgttgaacttagtcgattactattgggtatgtggtatccataaccctaacaacactatctttattttttaatgtatgacgccgttaactttttatcaacgtttgatcattcgtcttattcattttttttacaaatacaaaaatatttaaatcatacttaaaataacatatgataaaacatcaaatctcaataaaataaataataattacatatttttttataagagaaataatctcgaaaagttaatgatgtcatacattgaaaaataaaggcactcccttcgtcctgaatcatagagcgtccttttttaaggaaaatcaaattcaataacttttgactaataatcatactaaccatatatatgctaaatattatgcaagttatatcaataaattcatattttaaagtactttcatataatggtaattttatatttgttgggattgtaacatgaaattaattaatgatcaaactatgtttttgaagaccgtataaaaaatataaatcttataatttactcccttcgtttcataaaaaaccaaactagtaccagatgtgacacgtcctagtactaagaatctggacatacatctgttcagattcatcgtactagaatatgtcacatccgaatccgattctagatttgttttttacgggatggatggagcaggacttatggagcagctagcatcaacgtgcacggcaggttggcaccccgacctctgcaggtatcgcacgtacgtgccgtcgaatctctgcaggtatcgatcgtactcctgtatatcaacgtgcacggcatcccgacctcttcttatcgttgaccaacttgtagctagcagcgttacgtgcagccaccgcccgccgccgatcttatcttgttgttccaatccacatcgtccagctcggccgtcgccggtacatccggcttgtcaagtgcaccgcttcttcatttttcttattattatctacaccttcaccagctagccgtcgtctttaattattcatcaatttacatatctgatatcgtattaaagtttaaacctgtactacaactgaagctaagggtatgttatgtttagttcacattaaaattaaaaagtttggttaaaattaaaacgatgtaacgaaaaagttaaaagtttataagtgtagaaaagttttgatataatagaaaagttaaaaacttaaagaaaaagtttaaaactaaactcggtctaaacagatctcccaaacctttttttttcgcgtcaatgggtacaggataaagaaaccaaattctactctacctcatattttacgtgccccagttggataagcagcaggtagtgtgggtatctgtatgcatgcctccatagtcattgaagctcacgtgcgacgttgggagcatgatcgcgttggtgaaggtaaggccatgtgtacaacgcgtgaccctggcctatggtctcgtaggtccacgtcggagctgagccgagctggcacgagtttgggtggtctcgcagactgtcagtgagcttgcagaggaatcggtgcaaatgctgcgcctgggctggggagctgcgaagccacaagccgaagccttgcgttcgaggagtcggcgccccgcgcgttgcctcgtccagtcccccgtgccgtggtcgtcgtcgcctcgccagatccaccacagccaccatggtcgtcgtcgctgctccccgccaccgccaccgctactccccgccttcgctagatccgccgtcgtcagagctcgagcggcgcagatctgccgccggaggggagggcagcgaggggaggggagaaggaaaagagagggcggcgatgtggggggaggggagaggagaagagcgtcggtggagaagaaatcgaagagagagagaggagaataaaaaagagaaggggatgggaagaggctgacagtgggtctcaagttgtttaggagtatacatatacttcttttgattactatagggttcaaaatataaagtttcaataggtttgataatacaagggctgacatataaatagataggggctgacatgcaaaaacgttttggagtggctttcactgtgggtagtgtgacttttgtgtggttctatcctacgtggcgtcttgagatcacagttgcttatggctaccattgtacatgccctaaggccgtgtgtagttgcacagccaaaattcttttaagtatacgaacacacatttgaaatattaaatatagactaataataaaataaattacagattctgtttgtaaactgcttgacgaatttattaagcctaattaattcatcattaacaaatgtttacagtagcacacattgttaaattgtgcaattgattttttttatccacatttaatgctccatacatatgtctaaatatttaatatgataaaatttttagatgtttgaagggaactaaacacagtctaaacacagtctaagggggtgaaagagttgtatccatcacgatcgttccgacgccgcctgacgctgccacggtctggcccacctcgacgcagagcaccatcttgttggtcacctcggcaccactgcacgcaacacactgtagttgtggattgcctcagatcagtcgtgtgtgtcggggtacacaagcaggcggcgatggtctccatgcatctccgactcggaggaacggacaaaagagatagcagggagtccataacactcctcatccaagcagctggctgcagcatgatcagtcagtgaaagtggcaaatggttaagaaagaaatctctcctcaatagtaattttgtaggagcattggaaaaagtggtatttttgagagtgacgattccttagagcaggtataatagtagactataagttagctgtaaatatattttaaaaagataaatgagaagagcgaagagcagtgggatacagatttgtagccagctgtagcacggatttcaagacgcggtgtgtgtatgataggtgggaccagatattaatagtgtacagtatgtaactattatatgaatgaactattagatcgactatatatgaattggagttagtagttggctatactattaaacttgctcttagggtgtgtttgaataatgggaaacgggggtgggattgggattaggattggaaaattaatgaatggttaaaattaaatgaaagagagagaatgaatggttaagatttaaagatgtatttttgtaggtgagaaattatttccagtgtcaaatagttcaatttccccacgttggcggattaggatttttctgatgggtgtgcccaccaccttgactatattatcaaattgaaagactttggctatatataccaaatcaagactttgaccatatcaaattcaatgcacgtaggcacgccttgtactctacatagacaaatcaaacacttcaatttgatatggtcaaagtcttaattaaataatcagaaatgtatccagagatagaggtcaagaataacacatcaccaattgcaacttttttctacttaatttctcagttactctttgtctctattctgtagtttaccccatcaccatcatcaatgtgatgccttgctaagtgaagtagaatctgattctgatccgttatttggtgccttgctatagacagaaagtgtttctccttatatttgaatttgattcgatcgattcaatatttcttataagttcgaactctgattggtttcacctcttacatggatggctggatccgcacagctaacgcctgaagctggaccctgtatggctggcatgttgcctgctgatgcgatcgatcagtgcatccttgctgttggccggcctgttgctgttgtcgccggctcgccacaatgccgccgaacccggccagtccccacggcgctagtggctgtcgcctgttgggctgccggcgcatcatcggattgcgaacctctgatttacttgggcccccttgaaagataggattgtcaaaacatagaaatagaaaaaatgtagaaatagaatatcatatttattgaaattcctacgggatataaaaacacaataaagtttcaaaactaccgttcgatagtcacacagaaaagacataggaattcaagacacgggaaaaaaacataaggtaagacatcatgctaatttttctccaaaattccactacaatagtctattccataggaattttaaaggaatggtaggaatcaatcctttatttcaagagtaattttatggtctttgaggaggtatcatgaggtaccaccttttctattgtaaatttggttcctaggtactatgaggtaccaaattttacactaaatttttggtacctcatggtacctcctcaaggaccgtagaattgctcttatttcaaagggtctcatagaattatttcctattggttataaatcctttggaatttctatatttttcctttgtttcaaaggggatcttaacatgggtcactgatatatgatcctctactcaacgggtccacgtgtcagtaacttaaagttagagggacgtaaatgttgatgtgaaaaatcgcacgaataaacgaatacttgaaatatctgtttaacttcagtgccggtcctaatctttcaggttcaggacataccaattagtttgattctacaactaataatgtgtaaatgttagataatgataaccgatcggccacaaagccgattagagatcgtaacgatgagccgatgcttaaaagaatcggctatatttgagaatactttgcattgactagatttagattgaatataataaaaaagaaattctttaatagaatcaatcctgatagatcgaacctaatcgatacagtataagattattgacaatactaaagttaattatcatatgattataagatctaaataactagccggtgtacaaatatgtgagcagggcttaaaataactgtgatcggctcagaggtgatgcgacatgcaattaatgacctaatctttcgctttaatataagcaactataatacttcctccgtttcacaatatcaatatatgaatgtgagaaatactagaatgacttatattgtgatatctagattcattaacatcgatatgaatatgaaaaatgctagaatggcttacattatgaaacggaggaagtagatcagaacctaccgaggcattattaattgttggtaacaaagatcatatagattaataattatatgagttcagacaatagccgatgaggttacttaagctacatatggataatgtatcggctagaactctgatacaatcttatatgaaaatgtcatatttagttaaatatattaaacaagtcacgttcttagcagatcgaacctaacggtgaggtcaaagataacatgcaatcttaaacaaaagagttacatatcaggcaagcacactgaaaccctgataaaatcccaatcggcaattatagagcatgatatttcttatagctttaattacaacttagtagattcaaacctaaatgatgcaacaccaagttataattgaaattgatggatctaaacaagtccgcttacgcaagatacacagattaatctataacaacaaaacagtttacacgataacggcttaagcaagatgaatcagctgatagcagtaaacaataatattgtctaagattaaataatatatatgataaatgacgcttatatcgactggatcatagtgtcggttccaaccgatggaaaccctagccctgtcgatacatgcgtgttgacggaactcatcttgtcatcgaaaaccaaaaccgatgcagcccaactcaagaaaaaaaaagaactcgtcgaaaagaaaagctagggtggcgatgcaccgaaagttatattattgatgaattgtcctttacaatgatcccgggtgtacatatttatacacatgggttgatactacataattcttgttggatatggcacaaacttttctaaaaataaagtaaaaatatactacaagttctgatcgggctccaaacaatcttttctaaaaataaaatgaaaactaacttactttgtctaattaatagataaattatcatgccacttacttcttgaactcgatcggcctcttctagataaacttcctttaattgattaacttacttaaccaaatccactgatattaatccgactgctggcaactgataattcccatcaatcaattctaggactttgaaaccatactgactttaggccgatgaagattccaaatactttagaccgatgacgattccggagcttgtcaaattttaccgttacaagtaaatcagaggatactcttccgagcatcagcatagccacggcgttaaagcccggacctgttgtcgcgtacccacgacctgctgagtcccacagcgcccgcgccgccgatcgacgtgcgttcgctgcgctgaaccatatcgcgagcccaggggagaggagaactaacgctagctgcacacacacatggcacacggcagtacggcacaccgcacaagggcacctatagctagctgtgcttcttgggcacccgtccgaacattcagccaaccaaaacatactgcgccccggcggtatatttgtaaacaaaaaataatttatgaataaaaactgaaaaataaacttcgatagaaaaacttcaaaatcaactttaaatttaaggctaaaaatttaaattttagctgataaatataaacataagtaaaaaagatgaggctgctactccctccatttcatattaccggtctttctagaatttaaaattttgtatcaaaatatttgctctcacattccgaaacactttcttctctctgtgtactcttctaatgcagtcatacattaaagtactgtgataacttctattatatatattatatacttagaaaaataattgagatattttcttttaagatagaatggatataaacccggctgaagctacagtgattttttacgaggaaagataaggttacatgtattaattacaatcttcttctacaagtagctccaaaaaatgtatcaccgcagcaaacggtggatgaaatctccttcaatgtgagagccaatatatcttgaccggttttcagtagtgaatacaaattgtgaatacaataccggttttcagtataattcacggctgaacaaattgtgaatacaatccgtttccaaaaatattgatgaagccaacaccggcatttttacccatattttctcgcgcgcaagtggagatgttggcctagtttagctttttatgagattggattagcgcgataggagatgggaggacgattgtgtctttaaaggactccctccatttcaaaatataaagaaaaacctaaaactagattcagatatataatattaggtgatgtcatatcttaggttggtacactactacacaaagagttataggtgccggttcgtaaagggccatagatgcggattttcatccggcgccaattggtcggtaccaatacaaacaattgacacctatgaggaaaatagaactagcacctttagttttgctcgagccaaaaaaacagagagcccgctcgaatcgagccgaaatcaccaagcgtcgttacctcgccatgcgcccatgcgagttactccaaaatcaaattgaaatcccaaaatccccaaatcatccacaaatcatcaccaaaatcgattgacatcacataatgaacatactcaacaacaaaatcatccacaaattcacaaaaacatttacaaagaatccacaattgagactggggagaggaggagaggggatgacaaggggctggccaccgggcttcttcatgctccaccttctacttcgtcgccggtggggagaggagggcgttgccgtcgcctgccgcctgtcgtccgccacctcctctcttgcgccaccgcatgccgcctcccctcctgccagatccggcaaaggggaaggcgcagacgccgccgctgccgtcgccgaggtgcgccgcctcccctcctgctagatatggcagaggagagggtgctggcgccgccgcccccatcaccggaggccgctgcggcctcccatcccgccgcctcccctctcgctagatctggcggaggggaggtcgcagccgccgctgcgcgtgacaaagagaagtgagagaggcaagagagatagcgataatgccgatgctcactcattcgtatggataaggtcgacgacagatctgctcaacaaatctataattatttgtagatgtcgattttaattaactaacatttataatatattattataaagatgtcgggttttctaaaaaaaatcaatatctatagtataggtgacggtttttctttagaattaacccctaaagttaattaaaggtaccggttttatgtattttcaatccacggaagagagggaaaaatattataggtgatggttttagctgtttcgataactatagtcacaatcgctaacatgatgtcctcgtggttgtgccaagcatgtccttttcgtaccttgcgtggacgagttgaattcctctataaatgtgaccaaataaacctgaaccgagaccgttaatttgcttccttggtctttcgttgactctagtatagcttatcatcccagaagttttcctttgatcgaaagtggccgcccaggcatctggggagtcaaaataccacatgtgatcagtaaatgcacacgtacgtacgtggacaaatttctaatatggtaccgtaggctggtagcatcgtccatggtttaaacatgtactcccccgacctaaaatatacttcctcttttctaaaatgttgctagctaagttgttgtccagattcgttgtcataggataagtcaaatatcccattctagctagatagcaatattttagagcggagaaagtaagaaattaatttgtgtggatgtgacatatcctatgactatgaatctagatatgtcacgtccacctaaaatctcttatattttgagacggagagagtacaatattattgattactccctccgttgcaaattatagagggtactctttttaagaaaaattaaactctaaccttatatatgttaagtattatgtatgatatatcgctaaattcatttttttaagtatttttatgtggtgctaattttatatttattagaaatataacatgaaataaattaatggtcagagtatgttatttaaaatcatgtaaaaaaatatagaacttatagtttgtgacggatgagtacatgaaattttcaatttttttccatgtacgagaatagtcgttggagatgttatagtaattaattaagattagttgttattgattagtaactattaggagataactacacgttgggtacttgatccggagtgggaaaattgggcccccacgtcatgctgatgtcatcatgcaaaaactactttaaattattttttctcttaaattatttatccaaatcatgattcgattgtaacattaaattcgttgcaattaaatctttgaaacaagaccacatatagatatattctgacgaaattttttttttgcttattattgaattatttttaaatgttgcacgttgttctaccaagtatatcggaattgtttcactaagtggatcgaaaatgtttcaatcgtttaaatcggacgctgtttcaccttatataaaaacaatgtttcagcaaatagcgaaagaatatttcagttcactacaacatttgatccatatgtagtgaaacattataagtacactaggtgaaacatttttggtgaaacaaaaaaatgaaacgaattcctttaatagagggtttccaaaatatatgggtgatttgttgcaacggagtatgtgtgtggagacacgtggcaggtgggcagggagacgtggtggggccagggggcacgtgcgtctcgtgaggggagcacccgattttactcccccgccggtcgccagaccataaagaatttcgtactctctctgtttcatattgtaaaactgtctagtattgctcatatttatttagaagttatgcctaaatttttattaacatctatataaatataggtaatgctaaaaagtcttacattgtgaaacagagaaagtaattattaggtactccagttccgtataagacttacctggccttcttgaaaggcagcattataagtaactgtagccgcagaaatttcgtacttgaccgaacgaaagccgtagaatttaatcccaagtataataacaaatccgagcgctggcgcctataaaaggtggctcgctcattataccatccacggtcagtctcgcccatcttaattagcttgttgcataggccggcctgcttcaatcaaggtagaaacaagtgtaactctctctctccccccccccccccccttctctctcctctctctctcacattttatacctgacacacattctagttcggtaatactactacgggaagtgtatgctaaccatcaagccatgtacgtaggctgttaatattttgattttaggcaggaacgtttttattgacaggactgaaaatatatacagaatcagatcggagaatgatgcatgattctatcaaatttaaaataatgcatagtctctttgattattgaaatactctcgccattccaaaatgtataacgctgttgacttttcacataacatttgacaattcgcattattcaaaaaaattatataaatatcatttattttattatgacttgttttatcatcaaagaaattataatcttaacttatacttttagatgtttatattaaattctttaaataaaacgaagggtcaaatattatgagaaaagtcaaccgcgtcatatatatatatatatatatatatatatatagggatggaactgcagtatgttcttataaatggaaatctatatatattattgatttttaaaactctatgtaaagttaataaattttagtaataaattccatcatttaaaagggcacattcatgaataattgaattatgacattcatttgtatataacgtggataataaagtaattaatcatagatattaacatactcatctgaaatgttaataaagaagtccttaagaaaatacctgaaggtaccaagattttacactaaaaattttggtacctcaaggtatataacaaatacttgaaggtaccaaattttataaaatgtgatacttccggtactttttcaataatggcccgttaatataggtgttgtcagatcataatccattgagaatccatgcctttgtacttgaccctacattattaagaacacacaattctatgacattttggtcagcacgatccatgtcatgctagctccctgtaacaataagatcctaacatacgtcttggaatatcctatcaacctttcttgcataggctagcagtacatttctttcaactacttaaccatcacttgtttccatttagaaatagataataacctataggcaaacatgaatttagctccattgtattttcttgactctttctaacaaagaaatatagatcatcaagataatgcaagtattatatgctttaacgcatttttgctgattttggattcatcgatgatattccagatagatatctaacttttccaggtatttaattaaaaggtaaatcattataacccaagaataaaaattgtaaattttcatttgcaaccaacttggcatatttttttagtatatattgttccagacatcaaacataagaattcatgcttctaatttattcttatgacttatttatttttaaatgttttaattatgggttatacttttcatagttcaaagaaatagtaaattgaaaatttatcctacatataaacacttattatgacattctaatgttagaaattaaaatttattttgtatgtacatagaactgctataaaatcggtttggccagaatcggtttttacctgcggctggtcggatcacctgtaagtatacgtgtaaattaatggggatttttatagacggccaatcggaccacgtgccaaaatatattatcgtggtgatcataggcaggcgtcctaacaggtcagcgtgcgaaaatcgttatgacatgcagctgacttaagtgcgctgcatgcaataatgatttttcctatgatggtcgcttgtgataacatttttcaaggcgggctggttaggatggccacctgtgataatcgcatagacaatcaaaatcacgtcgcactgctctcttgacaagcacattcacactaacttgcagtgacaatcacattcacacccacattgcatcgacaattacgtacattcccaatcacagaaccatgacatatacattcataatcacaatcacattacatgcattgaaaatgacactgccttgtccaaatatactaccattcaaagataatatatgtagagagagagttcgacggatattttagacatattcaaccactgctggagaaagggtttttaaccccgattcgtaaccctatatagtccccgttatacaaccgggctataaatccaggactaaagataactatctttaatctcgagtgaaataattgggactaaaaaattcatctttagtctcggttggtaacaccaaccgattggtaggttttttagtttttttcattgtttttaattccttgcatattaatttcactccattcccaaatcatgcacaacaaattaatcatccataattcacatgcccatccacaaaatcatccacaatctacaagtcattcacaaaatcatccacaaaatctaaaataaactacaacaaagtttacaaatcattccaaacatctaaaaagatcacaaaatcatgacggccgccgccgccagccacgcgccgcttccaggccgtcgccaccccgccgcgcgccgcctctcggccgccgccactaggcttcccctcccgccggatctggcggaggggaggccgcccggccgtgcgccgccgcctatcccaccattgtttcctccgcggcggcttccgtcgggtcgcctccggccgccacctgccgtcgccgtcgtcggaggaggggagaaggggaggagatgggaaggggaggaaggggaggagatggccgggaggtggaggagagaaaatgagaggggaggaggaggagaggatgagaagggaggaggagagaatcggataaggacgagtaagcactactggagataatggcacgcggggctcggggctagattttcgcgattttttttagtttcgatcccggttggtataaacaaccgttccagttggtaatttcaaccggggctaaagataatgagggtttgacatgtttttgaaccgggactaaaaatggttaccaaccgaaactaaatatcaaagaagtacatgtaggcttttaaaccgggactaaatatatttttagtaccggttcttattcaaaccgggactaatgtgatttttatgtgactcagtaaagatcatttttctagtagtgacacatcacccaatttgtgtgcataccgcatgtacgtggtacatatagttagtataattattgtctacgatgtctacttcaacattaagtagtgcatgattaagcgcactttgtttcaattcgctccaaatgtttgatccattacagctccacatatattgtgaaatcatttatgctccgaataaaatatatgttggcctgaaacctacgtacgtcgaacatctatctggcccaactggatggggaaagggtcagcgaattggtacgtacccttgtacgtgttgacgccatttgaagccttccatttgacgccagaaaccctttgtgttgatcacaccgcaggagctagcagaaatataatgccacaacacaatgttatacacgtacgagtgggaaacactaccttatgttgtttctttctagtgaacgtgaatcctatagctaccatgcatgaaacattaatttctgctaggtttggtcatgatatgatcagtccattctgaatgcaaagggatcggatcgatcattctcgtggcttatacttggaatctcttttctttttctttgctggaatgactgactccattaattcatccaaactgtacagctagcttaatttacctattgacacttgtgttagctaggcttgaccggcgcgcgcggtggcgatggatctgaccatcactagtctcgtggcggcatgtctgagcatggcagttttgtttgtggccaccaaaatgatccaacaaagaccaagaaccctgtgcctgtacgaaaaggagaataaggaagaagaactacttcttccaccagtgatgagcgtagtttcagtactgactgcatatctgcctacacttatagccaagggtctaccggctgtgatccatgacctacactcgagactggtgacccttctggtgacggctcatttcttccaagcctcagaatcggagatccggcagtccaatatctacaaagttactgttcccgttttcggccgtggggttctgtacgacgtggacttggctaccaggagcaggcagataagcttctgtaccgactcgatcaagccaatcaacttgagaggccacgttgattctatggttcatgaggtggaggtgagcaatatgcaaacactatatgttatcctccagctggttggtcttttagtttcttccatgcatgcatgttaacttattactccctccgtttctaaatatttggcaccgttaactttttaccacatgtttgaccgttcgtcttattcaaaaaattttgtggaatatgtaaaactatacgtatatatataagtatatttaacaatgaatcaaatgataggaaaagaattaataattacttaaattttttaaataagacgaatggtcaaatatatttaaaaaggttaacggcatcaaatatttagaaagggattgaatatttccactcaattggtgtacatgttattcatatatagagatcatatatcaaaatgtttgccagtgtgacggatccggcttccagaagaactacttcatgtatctatatatataggcgctagctagatgcagttgcgaagccatgttgaaactagagggtgcacatgaacccccctaaattcataatttctcacttgaaaacactaaaatgtatagtattgcattaaaattttataaattttcaatggtagtgcacacccccttgttttgatgctatcttcgcccttggctatatgtgataagcaagcaagctagcaggcatgcctggtgtagtgatgtccaacaggagatgatgatgaacattaattatattattgattgaacaacattctttgttagcaggttaatttgctagcgtgaacttttaccatttgatgatctcactgaataattcagggcaggagatctgcctctttgattatgtggtatcatgcatacttttgacttttggtttgatttttcctatatatttatatgcgattttgcaatttgctggttagtaatatatatatatatatatatatatatatatatatatatatatatatatatatatatagagagagagagagagagagagagagagagttttcatatgttttattttgcgttatgacttagtatagatgccagagctagtcccatgcgtattatatatgtctcaattttgatcctagctagattgattggccactgcaatttgtagggctactttgcacagtggggggaagatggcgtagtggacataaagtatgagatggggaacctgatcctgctgattgcaaaccgatgcttgcttggaaaacagttcggggagagtaagttggaacaagtatccacactcctccatgagctcttcgacaacggtttccacttgatcagcctcttcttcccatatctccctaccccacagcaccgtcggcgcgacaaagcccgtgctatgctcggggagatgatccacgaggcagtgagatcacgcaggaattcaggcgtagctgaggatgatgtgctacagaaattcctagactccaaatacatcaacggccgctgcatgaccgagaatgagatcgccgggctactcatttgcatgatgtttgctgcgcagcacacgagctccagcaccagcacatggacaggagcttgcctgctcagccatggccaccgaagctacttggcagccgccatccaagagcagaaaagaatcatccagcaacatggggatcgcataaactggggcatcttgctacagatgaccacactgactcactgcatcaaagaggccctacggttgcaccctccagcaaacctgctgatacgccacgcaagcaagagcttcagcgtacaaacaagacaaggccacaggtatcaaatccccaagggacatacattggccacctgtacgactgtcggcaacagactgccctacatctataaggaccctaatgtatatgacccaagtagatttggtcctggtagagaggaggacaaagttggtggcaagttctcctacacaccgtttagtgccgggaggcacgtttgtttgggagaggatttcgcttacatgcaaattaaggtgatatggagccatttgctcaggaactttgacctcgaattgatctcccctttcccagaggaagaatgggagaaattcattccaggtcctaaaggtaaagtgatggttacatataagagacgacgattgctctgatcgatcagatgccgtattcttcttgtttgggcccgggacttacttgactcataattaaatatgttaagtgtgtaatctattagagagaataaagggtagaactgtgtgtatgtgtggagtcagtgtgtgtatatatatatatatatgtatgtaaaagttatatgcaagttatatgtgtggacactgtggagtcagtatacatacatacatgcatgcatacatacgtacgtacgtgggtgtgtgtgtatgtgtgtggagttagtataatgtaagttacaatataatttattgataaatatatagcaaaatcaaataaaagtgtgtgcacgtatgtttacactataagtatttctctaggtcgataatatgtgtcgttttggacaatgacacattctttagaaaacaactttaaccattataaaatatcaataaatatttgattttattccggccaggcggaggtggagacggcagggggaagggatggcgtaaacggcggactggcgggagaccggcagcaggcggtcgtggatgcggcgctcacgcggcggcgccccgggttggcggcaggggaggtgctggcggcgagagcacccgggaagcgatggcgcagaggcaaaggtaaggggcatggtgatggtggcacaggggagcgaggacggtggcagtgtggctttcggcgtggactctcgaccgcaggcgatgaagcacgagtaggcgaggcggtgcaccgagggtagcgggtgttggcgagtcgcggacgtcagcaaaaagagggcaaggcaggggtgatgtactgatgtgtcgagcggagagacgggctggacggcgtcggcgtgggaccgcgggaggccacagcacggcgctgtgccgggtacgggtacagggaggcggagaaagtcgtcggcgggggcccacatggccggcgggttttgccggcgaaaaaggaggcagcgcgtccgggattcgtcgcggagcggcgcgtgcacgactcggggcggcgcacggcgttgtgcgagcggtgcggggtggctcgacatttcgtcgagcaggtggcgcgcacaagtggctgcctagaggagaagatggcagctgggctggttgggccatcggggattgggggagggagatgggccggcctggttgctgggctgacggagagaggggaaaggagaaaattttcaccccaaacgaataggatcacgttgtattttcctgggaatttgggatttggaatttgaaggggatttgaattggattgaaatttgaatttcgaaaattgtaaatggactgtactataaatgggacattggactctaataatcctaggattatatttgtgaactttggatgatggagtagaaatctctaacggtacaaaccaaaattcaaataagtaccaaattttgaaaataaattttgtatttaaaataggttttaaatggaggcgaaaatcgggatgttacactttgtaactgcactgtaactatgatataacttatataaaacttgtattcaactatggtttggtttgttagcaccaggatcttacgcgtgacatgtgtgaaattttctttataatattatttctctttataaacaaatcttgaggcgatccgatgatcacaaatataaaaggggtaaaaaaaatactcaatctatttacttttgatagtcatatttcatcttggtataattctactagttattcctcgtaaacaagcgattcattaatatttacatttctcgatgcccatgtagccaatcttatgttgaaaaatagagagtcacgcattaaatccgagaaagtcattaagagaatagatggttggattgaaatataactatcaagtaaatttttcagatttaaaaatatgcctatcaaaaatacatgaaaagagtacttacagaaattttatagcaaatccgccagcgtaattacactctagtctatctctctgtccctcggggcttgatttcgactgttgtgacgggcatgtagtttctgtgcaccattttgacaggccaatcataaaattgatgggttgatttgtgttctactaccttcgttctaaaaagtcatgggtattcgtgtttaatgtttgatcatccgtcttatttaaataatttataaataaaaaattagtcatacataaagtattatttatattttatcatgtaataataataaataaataaaatttaaataagactaacggtcaaacgttggatataaacaatgtaaaacggtacttattttaggacggagttagcagtaagttgtagctgtacgccagaaacaaactaattttgcagtgttttcatatttcaaaacctgcaatgtgatgattgtaaggaaaattgacccattcaatagactttcatattgaaaaccgaaaaagctagagagggagagcaatccatggaaggaacacatcatcatacgcagtactcgtgttggagctccggcggctggagaaggaccatcggccggccggcgagtaacggcggcggagctcgggctgctggaggggaggtgccatccgccggcgtcggcgaggcgcccgcgcgatccgcggaaatagcatcgtcatggcttcgcgcgacatcatcatcgcaattagcgagcgacataggcggggattccaaaaaattcggatcgatcgaacgacgcaatccaatccaaacaagccccctcgtcgccgatctccgatcggatcgccgcttgattcgccatggatgatggtgatgagcccgtcccctatgtcatggatgagggtgtgctactacccttgctgtttccgccgccgctgccggccgacgacgacgccaccggcggcgtgagcccaagctgggtgtacctcgaagacagagcttacgtctcccccgatgcagtctccaactccaccaccgccttctccaccaccaccaccggcgtaaacatccatgtctccttctgcctcgcccgcccgccgcgcctctcctacctctgcgtccactgcccccgccccggcgacggcgagggcgcctaccggttcactgtcgatccccaagtcctcggcacgcacaccgatgtagccctcctccgcgtcccgcaccccaacgatgggctccaccgcggcatcaaatcctacgactacttcgtctacacggccggcggcgccacctcgctccggctgctgccgaacccgcgcgtctcccccttccgcaacgaggaggtcgccatcgtccgctgctccggcggcgcccgctacgtcatcgcctgcctcatgccaaccatcaggcgccccatggagttcaaggttatgcgcttcgactccgacgtcggccgctggaaatccacggcggtgtccatcagcgagccggtcgagagggacagggtgctccccatccctgacacggccagccaggtggtcttccactgcaccaccaaggtcatcacgctcggcggcaccatcggctgggtggatctctggagagggatcctgctgtgtgacgacgtgattgaccaacacccggtgctccgcgacctgccactgcccaagccagcgagaagcaaccgcaaatccttctgcagagggccgccgcatcattaccgggacatcaccgtcgtcgtgcaggactctgttcccacctgcatcaagtacgtcgagatggagacccgccccggtgatcggccacctcctcgacaacgacagccgccgcaacattctgatgactctgactctgatgaggaagaggacgttgcttactactggaaggctaacatatggagcatgccgataccagttggttcatggggggattggcagatggagtgcacggtggatgtcaccgacatcgccgtcgtcgacaatgtcaggttcagtgagctgctgccaaagattggcaatgatccagaggagacattgaggaggctggtcacaggtttccccacattgggtatggatggggatgtcatttctttcctgtccaagatcaatcgcttggatgatcagggatgggttatctctgttgatctgaggagtaagacgctgcaaggcgtggctgagcttgatgagaggaagaatttcctcttcgagcgctactacaacaccagtgagatctccaaatatcttatcaaggctacaggtttgctttataactgttgcaccataatactccgataatctaatggatagttcataaccttcactttgactactgtttacaagttgtctggttagaaacttgattcatatgagtgtgtttaattttcagggtgcactcctaggatttgtttttgaagtgccacttaaaccctctctctgtatgttgtgtgtttgatgcaggtgaggcaggaactcttgtaaaaactggggttaatagagtctcaagaaagaagaagtaggaattaattaatgaatcacgtaggctatctgggttgaagaaatgaaacgagctgcagagactgggcgattaatgagctactttatcagagttgttctgttcaagacatgctactttctgtaatggatttggttttcgcctatctatcctgagttaaactgtatcttcccctgatgattggccggaaatggatactcaggaattttgttcagttattatactataataaaatgtcaagctggcgaccccatcgttagagttcgtgttttacctttcgttttgtaatgaactctcttgctttccggctttcttcaaaagccagatttcgttcgaaatcagcaaaaaaatttcttcaaaaaatttcgttcgaaatatcagaatttgtctgaaatttcggaatttcggtgcccaccgaaattttcttgcttctccgaagggaaaaccctggctggaggaccatccgtcggccggcgaggaacggcggcggagctccggctgctgtagggagggaggcgcccgcgggccggcgtcggcgaggaggccccgcgatccgtggaaatagcataatggcttcacgcgacgtcatggcaattacaattagcgagcgagataggccggagttcggatcgaacgacgaaattcaatccaatcaagccccctcgtagctgatctccgatcggatcgccgccttattccgccctgatcgaacgactgttatttgatgtatttatatcgattaagttgtttatataagtctgtattggagtaatagccaatacagtatctattattgctctaaatactgaattatcggctatttctataatattgtatagaagcgattgataaaaacaaaagagatactccctccatttcaggttataaaatgttttgactttgatcaaagtcaaactgtttcaagtttgaccaaatttgtactcaacccaagacaaatttattattaaaatatattcaattattaatttaataaaactaattttgactataaatattactatatttgcataggaataagttcgcttgagatcccttaacttgggaatctgattttcgtccttcaaccataaaaccagatacaacgggtccctcaattattaaaaccgatacaaagcaggtctctcagcggttttgatggtggttttggctgatgtgacgcctacgtggccggtttgacttggtctttgtcctacgtggcgatgatgtggcactagaagcaaaattaaaaataaaacaaaaatgtggggcccatgtgtcagttagacaaaaaggaaaaacagtgggacccaccccatcctccctatccacggacgacgggagagggccgaccggccggcgcctccttctctctccctcccggccatccttcctccccggccggcgagcgcgcacggagagggaaaaaggcgccggccggggaggaaggatggcctggagggagagagagtaggaggtgccggccgatcacccctctcccgtcgtccgtggatagagaggatggtccactgtttttcctatttatctagctgacatgtgggccccatatttttttttaatttttataatttttatatttttacattttgcttctagtgccacgtcaccgccacataggacgaggaccaagtcgaaccggccacgtaggcgccacatcagttaaaaccaccatcaaaaccgctgagggacctgctttgcaccgattttgatagttgagggacccgttgtatctggctttttggttgaaggacgaaaatcggattccttaacaagttaagggacctcaagtgaacttattcctatttgcatataaatttagtcaaacttaaaatagtttgactttgaccaaagtcaaaacgtgttatagtctgaaacggagagagtagtattgtagccgataggacatacttcatctgtttcaggttataagacttactactctcctggtttcatgttataagacgttttgactttggtcaaagtcaaactacttcaagtttgactaagtttgtagaaaaaataataacattttcaacacaagacaaatttattatgaaaatatattcaattattaatttaatgaaactaatttgatattataaaattactatatttgtttataaacttagtcaaacttaaagtagtttgactttgaccaaagtcaaaacgtcttataacctgaaacagagggattatttagagtttgtcacttgtttatcataaagccgcagccgatttggtttaactgcatcagctgggtcttgacggtacgtcacccagggttattgtaaaaaacatcattctgctagtactgttttatttctagaagcgccacttatgatccattcaatttttaatgtttgatgccgtttactgctggatataatttgaccattcgtcttatcaaaatattatgcaaatattaaaaatgtaattctgctaaaagttctttaggcattaaacaaataacaataagataaataataattacataattttaataaaacaaatgatcaaaacgtacgtccaaaagttaaacgcgtaaaaaataaaaacagagagagtaattattactccatcaggagagtaattatttcaaaaataaagtgtttattagatattttgactgcattcacagactagttaagggcttaactaaaaactgcactttactaaatcacagtggtgtctgtcatgataacgttttagagaggatcaattagtttccgaccgtttgatctactcctaatcatgcagtcgccaggcgatagcacaagataaagagaaagtacttagcgcctgcatgcggctggtgctgccaataccatgcattatttgtgggactgcatggccttccataggttggaagaaaaattagtttggtgggtgagagaaaaggcagattaagggcttgtccgttttagagaaaaacaaagcatttggattcataagattaatttttatgagcgtcattccatttgttggattgaggtataggaaaatcaaaggaaagtttcctttcctacaagttgtatagagaaaacataggaatttttccatccactcaaacatgttggaaaaattcctatggattgatgtatgcaaacattcctattcttgcaccttttctattcctatggattcaaattcctcaaaatcgaataagccctaaagtggtgggggcctaaatttgattatatttaaaagttggatgatagattttttggaaatttttgtatagtaatccaatagctagttattgtatatattagcaattcctacctttgatgtgaacaactttggagacaaccgctagctctcttatatatattaaacttgctttagttaagaatatattgcgagagagagagagagtaaaggcacgttcaatagtaaagacgagtatggtcgcttaggcaatataagattatttagaaaccatgtctttacaacagtgagatgataaaagctctaatataaccattaattaaaaataagattcttttatttccattgtttcctttttttttcaccctcatacaactatgttttcattgtatgaaggctaaaagccgttgttaggcatgttcaaatcagagcccatatatatataaacgcttaaatactaccttcgtcctaaaatataagcatttttagctatgaatctgggcactagctaaaaatacttacattttgggacggaggtagtatttaagggtttagtaacatatgtttacttagataccatgtccttacaacggtgaacacagcaaacactctaaaccattaatctacaaaattattttttattactattatttccttgttcacatctttatgcagcaaagttttcattttatagatgttcaaagtcgtcgctaaaaagttgttaaccatagtaaaaataatgtttgcctctccttgtttctctctctctctatcatttagcaaacatttctaattagtaacgttaagagactaccattgcacatgccctaagaacaggtacaatagagtaggtacaatagcaggctataagttagccatagactcattttgagaagatagaagatgtgagagaatagcggcgggctacagatttgtagccagctacagtacggactttaaaatacatgtgtagtgtatgacaggtgggactaaatattaattatgtagtatatgtttataggtaactattgtataaattagctattaagttgactataaataatttgaaggtagcaatttgctatactattaaacttgctctaatactatagtatatccttttccgtacatgtagcaaaagcttactgttctaggagtattaattattgctagctgatcataccacgttagtcgttaagcatgcatgcagctaggacttaagtggtgccccacaaatagggctggaaacgagccgagccaagccaggctcggctcggcttgcaatggctcgtaacaaggtaggtttggcttgactcggctcggttagggaaacgagctaaaacataaactcagctcggcttgtttcctggctcgagccagctcgagctggcttgcgagccttctgttgaagctacataatttataatcattaaggaaaacaataacaaattatcaacatgtaaaattaaaataactttatatattcaattcattagaatatagataataaattacatattgacaaataataactctattggaaaataaaatcatccatataaatatatgatggcctaagctcacgagccaaatcaagcggctcgcgagttagctcgggcttggctcgtttcaggaacgagctaaaaaggaggcttgggcttggctcgtttggcattcaagccgagctgagctaagcgagcttgagccaagcccgagctgagctcacgagcccaagctttttttccacccctacccacaaataactaattaattcctgctttgtgtttgaaaagggaaaccatacgtgcttttgtgcttttgtacgcatgcaaaaattatacccctacttgcattaattagcacggttagttgatgttgatcctggtcgtgtagtatctctgttttaaaaagggaaaccacttgcattagcacggcttaatttgatgctacgtacacttgcatgcatggttacgaacgttctataactgcatcacgatggtggggttttgatagaagagtctacatagcctttaattgtttgttcggcgttctatgaaattagaaaaaattctacgttgagaaaaaaaatgtagacatccactcgtctaacgagaaatacccaggggtcttttggctaactccataaggtggtgggctatatgatctgggttcaaagcctcaccatttctaattatttgatattaggtcctttcctaatattcgagtctttttttatccactcgtttatggttccatgacattaaaaaaaactagatgaaaatatatagataaatatatgttaaatattatagaaatggtatatcgatatatgttgaaatatgtgaaaatgatgtggtgatgatgactttgatacgtttgcatgttaaaatctagattatacactaatttgtaaataatattgtatgtttgtatgtgctttaaaatcagtaataattgttgggtaatgatataacttgtgtgcatgttcagctttagaatatactgaggttataactaatatcgtacctagggattgaaggtccaactgcgaaacacataatgagactctaaaattaaatattactccgtattttaatggatgacggtgttgacttttttgaccaatgtttgactattcattttatttaaaatttttgtgcaaatatgaaaatattcatgtcatgcttaaagaacatttgatgatgaattaagtcacaataaaataaatgacaattacataacctttttttaataagacgaatggtcaaacgttagaaaaaaatcaacggtgtcataaattaaaatatagaggtagtataatttaaccaaagcatgctttcccataattagaaacgaatcatcaagcacaacccatcaatgggattgggtaaatgggccttgtaatctttatggtttgtttttttcttctgtttactaagccttgtaatttgatgctaattaagtatagataattactacgaatgatagacttgtggtcctaattttttttggcctgaacacctgcacaccttgtactataccagtataccggccaatatatgactccagttgtaactatggtataggctctacgcttgggagaaaaaaaaaatagtagtgagattgagttacaacgccaccacttgaatcggcaataagaaatttttaccttctatacctattcgatcgaggaccgtaaatttactagtatttatttagagaaaaaaaagagtttatatacgtactatatgttaccagtaccacacagccgattagctatttaatgttttgagactgcatctttagatcttttcaaattgagccacctggctgttgttttcggctgtataaagaaaacgcaaaccctcttactaatatttataaaaacatagtacaaacgtagttgtctataacacacgtatacttatctctataaatacacacacgtataccctattcctataagtacccataaaagattaggtcggtgcatctttgatattggtgaagttaccacgaacgtgttgctgtcgacgggtaatcaagaaaaagaaataaaacaataataaaatgtggtagaaataataaagggagtggtttgtttggaccaacgtactcacctgcttgacagtgtgtttagttcagcgtaaagtttagattttagttgaaattggagatgatatgactgaaaaattatgtgtgtatgacaggttgatgtgatgaaaaaggactgaagtttggatccaaactgatctaaacacagccatatactcctatatacacggtactcctagcttgtggttcaactttagtactactagtagcttgtggttcaacacgtctatccgaagtatataagaacccacgccggcctcagtgcggatgaggccgaggggttttttactttacccattgccctcccacctgctccccctcctgccctcccaccctcttgtgcgcattccgtcgagcacgtcgcgggcgcacctcccgccgctgcctcggcttgccccaccgcggatcgcagagcgaagcatccccgctaggctactaaagatgcctcatcatggtggtaggaagaagaagaacaagggtgggaaggggaagcctcggaagaagaccgacgaccgcggagaggccaatgtcgggtcgggcgacagctcgcccgccgtccgcgtcgaggaggaggcggaggtggaggcggaggcggaggtggggacggcggtcgagccgcagcgctcgggaacgttggcctcgcccactgacgtcgtcgaggcagcccaacacggccagcggcagcagcaggcctcccagtcccaacagacaccaagccctcgaagttatgcagctgcagtggtgaacaaaagagaagatgaaacagttggctacaacttccttcagttccttcgaaggtatcaactatttcttggattgatgtatcctagagagcataagactagcccaatgtgatttataaaaattgaagatgtgtttcatcagatcaagttcttattacgaacgacatagctgtcctactatgtttcttcttccgacacatgtgtgcacataagtgaagatcctacgtaaaatccagtaatcataataggagttttgggatgggcttaaagcagagaactgaatcgggctctcttttttaaagactggtttgagatattttttgggccttccattgagaaaagaagatgtatgctgggtgtatcatcgcctcaatgctcttctgctaattggctatttatgtagtctgctcgtctccatggctccatatgcatatgcatgtaaatccatttcttttagggaaactaccgtaggagagcatcctacacatgcacatccaattaagctctctgatacaaatatggacatgtttatgagtacatgtcaggattgctccctgcaataatgcaaatatgtctaaattaaatcccaatgatttcatacaatagaaaattcataaaatgccatcataaatataagtgagttgtgaaatactatcgtatacgagaatgatcatgtggggtctggacccacatgttaatgacatatacgatgatatttttcaacttcatgatcttcgtgatagtttttcatgatcatgtggggtctgcacgggcactttttctagtcatattataatttttttgaaggatgtataaatttgttttttgacattatagtctcatgcagcttcacagtagagcacagagaagggcctttctatgctggggaactaaagagtatggtctatcagaacagcaaaactttttgtgtctactatgggcacttccaaggacaatatgcaaacctgggtacaaaaatatccaactcatatgcgaggtgcgacttgctacttatttacattgcctttttccaaatgttatatcagctgaaaatattgatgaatcgctttacaaattcctgccattacctttcgaatttgttaatttatggtgacacaattatatagagagagcatgcatgtggaagtcagaagcaaaagtagttaatagagagcagactgaagacaggagaatatatgaatgactagagagtgtaactttcttttaatgtcaactgaaagtgtatgaataatttcctatgcttcttaggaaatccaattgtggtcaaaatgttcttactaatctcagtaacatgtattctgccaaatactgtggttggaatttatcagattattttggattgtgtagttaagtttatacctcaaatttatggcgtatgttgtatagacagatctttatcttttgcaaatgttgtaactgtgcgttcattctgaacagggtcgtgggcttcttgcgaagtgctataggaagattcatcaccgaatatgaacttgatgatcaatggagagaaatatcaaatgaccccccaaagattcatattgatgccctgcccccagctggaaggtttgctctctacatgagatagaaaagagaaaaggaagtcttatgcgccttgtcttttgagtaaagactaactgtgtcattttaatgcagcattgtttcacttcaatatttcctgggacaagcacataacaaacttgtggagactgcacgcatctatgatcccaatggtagcttagtcgctgatagtactaagctgggaaggagagtgttcctagggttcctcatatatatcatcaatcagcataaagatggacgcagttggtgtggtgaattttctattgatgatctactagtcagaaatgaatcaacatttggaatcacgaaggcagcttcttcccatgcaagttgtaaagcaatggctaaggatctgaaacagttggcaaagatactagagaaacactttcgcacagctcaagggcaggtccctggctacttcattaagcttttttctgaactaaaagagagcgcaggagagctcgggcagtacaactcagagaaaaccaggaagttccataagtatctgagttcgcatcttgcactcaggtctgcgatgtcaaggaggcacctgtttatggatttgttccgagcgtaccagctacttgggaaaactgcaaagaaggatttgatatcccttctaggatccatgtttccagaagataaatggcttgaccaagtagacaagcaccaaatgtttataaaagtatctgagtatggcatcgtggaaggtgacgcagataaggcatccaacagtcaagatcagaagaagaaaagatcatacagtggcgatcttttagatttgctggtgtttatccgccacgttactgagcacggggcggatcacacgaaagtacgggcatatgaaatcttaattttctctttcatttcatatatgtgcaagttcaatttcctgacaagtgttcaaaactttgtctttaaggatgataacatggagcaaaaactcaagagtttggttgaaattgacttgataattgctaagtatctttcggctgctgttgtagaccttatcaaggctttggtgaagagtgacttgctaaaagacacgtactttttcttctcttgtatgtttatttgttttctcttgaaatatatttgttgaaatgattattttccatattgcaggttttctgacccgtggaatgcgttttctaattcttcctaataggtatataaagttttacttattttcctgccatttgatcttctagtaaatttcatagtatccatattctgcatctgcgggtcaactttcttattactactataacaaagtagttgcataatgattactgtcaccgacaataccttgacccgcactatatatgaaaatccgctgcatttcgtgaatagtggctagcactaataacaatatcctgtgagtccactacttacatattacacactatttactgtcccagggcccataggttttttttttttttgccaggtcggccaaaagattcggtcgaccaatttcattaaggaaaaggattttggaaaacattacaaagaagcttacaacgacagtacgctgtcgagatggagaagggctaggccctcatcccgtaagctggagaggaaaaaaaaagtacaatgccctaaggcaaactctaatcagagatgatcgttattacatggttggataactcctgcggtcttccacactaggatttcctccttgatatcctccactagttgctcaggggtgcgcactttctgctcgaagatcctaacattacgctctttccacagagaccagcagattagggcgacaacactgtcaaagatgtccctgtagccggtccgaaaaaacctccttgcgttcgtccaccaatctgttaggttttcttcttcatgtccagacacggggaagctgattccaatccattttttcatcagtagccagactctctgggtgtaatcacaagtgagcaacagatgtgagcagctttcatcttcacgctgacatagcacacaatgttcctcgtgcggccatcccttcttttcaagattgtcggctgttgaacagtgaccctttgcagccagccacaagaaaaatcttactttggaaggtgtcttggtggtccagatcagctcactggagacacagagctccctggccatgaagaacagctcatatgctgaagaaacagataacctcccgtcaggtgttggcccatggggtgtaatactccgttgatgaactttcttcttagcctctgtgacagaccattttcaacctgaaaggaagcaacgaatcatgcgtgcactattaacaatttcttcacagcattattcctgcaaccactttgcttcaaacctgaagccactgttgcccccttgacatcacagaaatcttgtaactccaattagtatggtcacaggtttatgatctgagtatcttggatctcgtagtatcaccttatatgacgggaaccttgtcaccaattttgggacccaacagccctatcaagtctgtcttttacatatttgttggcctcatggctgttgtttcctccaggtctgtacttgtctcctaaataaccaagatcatgaaccttgttgaagtgtttggcacaaagccatggaagttgctgatgttgattttcaagagcttccaagtcttactctctcttatctgtctctggttcccataagagcatgtgaaccatcctgctccaccatcaccacattaatatgatatctggaataattgtgaactcaatgtttacatgtttcttccacaatagagcaagcccaccacttcttccacaatagagcaagcccaccacttcaatatttgacattcccagcaagtacttgaaccaactcgtcctcttctcatctattttagtttagtatctggtaatataaaatgttgaggtcctcttgcttctggaggtccagaagccctcaactgccaggacattccccaattcccagcagttccaagctgttaatcctcgttttggcttgctggcctgtcactgcagcccagactttacaatttctaaagtggtgttttcttcctttttcatcctccccatcatctcttgctttctttaacaaccctgtctctacctcaacctccatcaagtcagcattcctcttactcctttgtttgccctctccccttgctatacgcttcaaagtaccttgccttgtgcctgttgctgtcttttgatcaccgctttctactcttctctgatcccccactttctcatcaagcttatcactggtttgtcttgcgcttgatcactctcctttttagttgttgttgttgttgttataatattgttcttcttcttcttgttgttcttgtggagaagagacaacacgctaatttggatctataacctactaatattaggctttggaaatctgtgatatatcatataaccgagcagactcgacataaaaaagttttcctctgggtcctatctatggttaatagttgccgactacaattgccttgattctttaagtgaaacagttggagagtaccatatgtttatcccagttgaaaaaacagtggttatacccttctttttacaaaaaacagcaggcgagactcctacacatatagccactaaggataatcagaagttagggagtgaaatcggcctgaatcttttggactaccttatgcctgtacttagttaaaacttttcactcctgaataataaattgtgttatgtgtctagatgtgtattacaaatgcatttacatatgtggtttatgcttatctcttattgtactactctgtactattagcacaaatgtgtatgtggataggaatcgtttaaattgtttactttacatgttctggtttgctgaatctatccgtgctgaaaagccttcattaaattagttgttgttttttcttttttttaaaaaaaaaaattctacgatgtgccatggtctgtgcctccatgccaaaggcggggggtggggttatcatctgtggggttacttggtagtttatattaaaaagaagagtaaactaaaaagaattagtggcaaggatcaattctgataaaatttttaaggtttataatcctagcaactgatgccatcagttgtgaatatgaatagctccagcttccagttataatttcaaccatatatattattgaaccctgtttcttaacaccatcatcccaaaaacagaaacaaacagcaatgcaactacaaaagcttcatctatatgaaatcccaattcacatccaacatgtgaaacctacactgatacaatgttatcatatctatgaaacaaacatttgtatgactagctcacccttcagatatctaacaaaataaagcgcaccaacatgcgaataatttgtttgaatgccattgccaaacctacgtaaaccttgtactcttgaattttgctttccatagacactgagttcaaaaaccgatgatccatttccttcctatgactttttagtttatactcgtgaactttgctggcaagcccaaagctttatgtgttgtatcataatagggataatatttttaaaaaaatacaaagaagattacaagatcagaattgacaaaaaatagtggttatatcattggcaatatgggagtggggaacatcgatcgtatttagcatcaaagacttaaatcaccagccccaaccaattcctgcttgcccttggtgtggaagaagtaatccttttatatctgttgatgcaggtgggttagcacgcttgttggagaagagaggcaccactgcatatcttgtattcaaagtgccgtcaaggacttgagagtgcctcgttcagtaatcatagttagctgaagtctgtggtgtaggtgtttagcttccaaacttggttagaattttgagtttcctgcttactggcgtagtatgcttcatatttttttcctttttcttgttttgaggttgggccaggtgaggtaccccccgctctccagtaaggacccctgactgttagttctatgccaggagagtagttttggtgtgatgtgttgggacttgggagttgttcagtctttttgagcttaacctgtaaagttggtacccggcgtgcgtatggatcggagctggtgaacagagaaggaagacgcgcacattggggatgattttggagcgtgttgactgttgaggactggtaggttgctagggaaatcagcataacctggattacagcccttgtttggggggtttgttctctgtcggttggtctgcaatgtttattttaatcccctttcttattgttggctatttcttgtcatgctaccctcatggaaatatcgatcttttacattagcatataaaatattaattattggaccataaataatgcttaaagatataattccatagcaatttaaatcaatggaatatagaatactttggtaagatggccaaaattgccaaaattctatggggtctctagccaaacaaaggaggctggaggaatgtatcacgatagatgtgaaagtggtcttatatagattgcctgtgaattgtaatacaaaattaatcagttgggatggaccgggataattatttcatactttatataggcatgtgcatgtctcaaagtttgctaattttgtttgttgtactaattgataaggctggtgtatgcttttctaggagtatcaagttagtaatagtgaaaaattcttttagaagtggtagaagagttacctggtttttttaaccttaatagttgcctgattttagctcaacatccatagcataaggagcccattggctaaacaatctcaacgcacagtttgagagatgatcataacaaaatctgatagtaagagattgatgttaccagctgatagtctgtcaaacaatttagaggattggtgttattcatcttttttctggaacaaacaataccacatgtaatccaaaggaaaagatacatacagaataaagctaatgtaacatctacatgctagcaaaagtccacaaaagagagagagctatagaggtgtggagctgatagtaaaaatcaaaacatatacaaattcagctaggaaaagtgtgaaactgtacggtagctaggtaagcaaccagcagtagctatccgcgagaaagtacttggatgaagtagtaaaataattgattgtacatcaacaaatctaacatttactcagatgaaatttcacatgctgcgctcggaaactggatgctaagtgctaacatgtgagcaagaaccaaagagggagaaaaagatgatattgcagttacattacgcttgataactcgatttaccttggctgcgtatatctatttagatgtagaattcaggtattacccattagttttaaaaaagaaagcccgcggccactcacatttgtggtccaatcgattgataaagagcactccacattagggttgatgatggagaattacaatgtaattaaagaggataacggagagagggattaatcaccgcaattgatatttcattaataactagttgggtggccttgcgcggctagcacccatacaaaattatttattttttaatgtgattttgcttaaaatttgttaaatatctatctcgttgtcttaggattttgagagaccgaactttatcatccgcgcgtttctaattttataggttttaaaagtcacttcggtcgctaccccttactcatttctcaggtctttatttacttgtcgatctatcacttttttattcatatcttccatgaaacctttaaaaattagatcttttagtttttagagttcattgtctttgaattttgtttttataatttttttaaagttacgtcaaacaccgccattatactcctctatggcccctccgctgcctcctctatttattatcattgggattttaaaaatcaaacataattattgtttgtgtttatttatttttttactttctggaagtcccgctaaaccgtcagtggctttatcattgtactcctctgcgcgtgacccgcccgttgcctcccctctttattgtcattgagtatttaaaaattgagcatgattattattgggatttatttttctactttctagaatcccgccaactgccatgatcatgttgcttaatggtttgttcgttgtcgcatctcttaatcgtcattgggattctatttggagttttctttatatgtttatagtttttacatgtcccaccaactgccaccactttactcctatgcaggcttattgtttttcgccctcttcattgtcgatattgctgtctgaactattcttttcgaaaaatccatatttttcatttttataattttttatttgtaaattgtattcatacttgaactcttataattatttttctatttttgaaatttattttatttgttattttgaattttagttaatctcatcacatgttctatatggtctattattttaatatttttatttttattgcgaattttaattatttataaattgtatttctagttgaactctttttttatttttataattcctgaatttattttattttttatttcgaattctaattaatctcgtgctatgttattgattgattaattgttgttttaatattttttatgctgaattttaattattaaaaatatatattcctacttgaacttttcttttctttcctaatttcagaaatttatatatttagtattccgaattttaattaattatgtatttggttcttatatgaactcctctatcaatattgcttattttaaattccgaattagttatttcaaaattgtattcctacttaaactcttattttcttttttaatttcaatttttttatttttattctgaattttaattaatcacgtattgggttcttatatggactactctttcaatatttcttctttttaattccgaatttgaattttttttagattgtatttctatttggactcttcttttctttttcttcaattaatgtgtgaatttctagccctcacagcgtatatggtgccttctttttgagctgtgttaataatataactagccgggtggcccacgcaattgcgcggctagcacccaaacaaaatcatatttttttcagtatgattttacttaaaatttactaaatagctatctcgttgtcttaagaatttgaaagaccaaacattatgatccccgtatttctaattatatagtttttaaaagtcacacccagctgctatcccttacttctatcatatcattctttatttgattgcttgatctaccactatttctattcattctcctttaaacctttaaaaattagatcaaccgccaccactctactcctgtataggcatgttacttattttatctcgtcatgtgttttagatggtcttttctttcaatagtctttattttttatcacaaattttaattatttacaaattgtattcctaactgaaatcttttttctttttctaatttcagaatttatttttttcaaattttaattaatacagtatagtgttcttttaaatttattttttatttttgaatttcagttgtttcaaaattacatctctacttaaactctctttgatttttctaattttggatatttttttatttttttaattccgaatttcagttaattttaaattgtattcctacttgaactcttcttatctttttgctagtttcggattttatttttatttttattccgaatattaattaatctcgtatcgggttcttatatggactcttctctcaatattccttatttttaattccgaatttcagtaatttttaaattgtaatcctacttggactctccttttcttttctaatttcggattttattttattttgtgtcaaacaaaatcatattttttaagtataattttacttaaaatttattaaatagctatctcattgtcttaagactttgaaagaccaaaccttatcatcctcgtgtttttaattatatagttttaagtcacaccagttgctatcctttatgtcatctccttcttcatttgcttgctcgatctaccactatttctacttattcttcttgaaatcttttaaaattggatttttatagtttgtagagtttattgtcacgttgggtttcgtttttataatttctagatttcccgtcaaacgttgccattatactcctctatggtccatccactgtctttctctttattgtcattgagattttaaaaatcgaacataattattgtctgggttcatttttactctctagaagtcctgccaaaccgttagcggctttgccattgtactcctctatagctcgcccgctgcctcccttctttattgtcattgagattttaatatcgaacatgattatcattgcttttttttttactttttagaagttccaaacctttaaaaattagacttgtagtttcattttttataatttttagaagtcccattaaacgatgccattatgcctctctatagcccgtccgcggcctactctttattgtattcctacttgaactcttcttttattttctttttctaatttcagatttatttttatttttattctgaattttaattaatcttgtattgggttcttacatggactcttcttttaatatttgttatttttaattccgaatttcagctatttttaatttgtattcctacttggactctcatttcattttctaattttggattttattttatttttattttgaattttgattaatctcgtattgggttcttatatggaaacttctttcaatattgcttatttttaatttcgaatttcagctattttaaaattgtatttctagttggactcttcttttctttttctctgattaatagatagatagattacggacgttactaatacttgtacgcaggattttttgccagtccgttcatcgccacatcgtgtggaaggcatttcttcttccccgtagctgaaattcagatttaaaaatacatagtctatatataaatacaatttaaaaatagctgaaattaggatttaaatatatggaatataggagcagggagcatttttacccgtggttcaatcgatatggtgcttggtgcaggtggaaaaagttttttttttttcgtatgcacaagactcactcagatcatgtgcttgtgggagttggcttcaagaggagaggaatgacatctcaaaagcgtgtttcgttaaaatgccaatatgaagcgcgtgatcacagccattttgccattttcaattccatatttgctgcaatgtggcttgatgagaccaaattacccctgctcacccagttgctgctgcttcgtcaccacagcgacagagacatcccgacggagctcctggcggttctttaccgccagcgtccgcgccgacctccgcccggtcttcgccttcctcaccgacgacctcgccgtcccggacaccacctaacgccgcgtcgtcgtcaaatgcccccagaccctcgcctgcagcgtccgcgaccagctccgctcggcgctcctctacctctgccgccttggctttcacgacggccgtgctctctgtcttcaggaccccatcctcgactgttcgacggcgaggaggcacccccagccgacgccgacgtgcgctgttcctaaaaacggaccggtgctcgcctgctcggactcacttggggcgcgggatggaggcagcgagccggtgagcagcggcacgcatgtttcgtgactgtcacgcccggaaatatacaccatttccaaacgctcagtgcattaatcctcgtcccaggaggcgaggtacacatagacattgttgattattacatgccacacttgcggaaacgtaaaggagtacttgattacatgggcgacttaggccctcacactcaaagataaacaaataaaacagcggaagactacggaacagcagcagccacaggcactcgacggcggagcgaactagagatccaagccttcaccttcctcaggtccatcctctggattatttttgtgagcaagagtgagtaccaccaccgtactcagcaagtcacaccggaaatgcaacaataatgcgtagggaaaacaaggaaatggcctaatagggtttattttgcataaagccataatttaaacattttaatcaagttaaagctcattttaaaacacgatcctgttctaagccaatattttaatatcatcaaggtcgcatgagcctgcgaacctgccttaacccaggctaatctccacatgactacaccatcatgatttcaccctccaatgttttataaaacaaaactaactttgggtacattgctcagcttgcccataaccgagggcgcggctattcgaatagtttttaactctgatcagaggtgtacaactttacccacaagacacaacctcaacacgcgttgccacgcgccgggtaccaccacggtactcggatagaggtcgtgacaagactatccatctaggtctacccaaaacaggagaacccgctgaggtttcgccgcccgccggtccccgacaaggtaaaggttgtcggatcccccgggacgagtcaggcccccccttgcgccgggtgaaaaacggccttaatcctggccccacacccttccaaccaatggtctctgttttgagaagatctaaatttccagtcaggccttacccactagacttgtggttgcacgaagatgccttgcaacagaggcccgaagaccggtccttatattagccggggtgcgactaccaaagtaactagcttgcaccccaagcccagcccaaaaaaaatatattttagttgcacaaatcattttatcacccatctattgacaaaccagtcaatagtccataactaatccaattttagttgttaaccaccaaagtctagtttaaccaaaagttctaggttggaactaagcatgactaagcatttacctaaagcaactagtcagtccatcatgtagggtactagactagtcaagttataattttactagggttcacaaagatcatggatatcaaatcaacatcatggccataaccaagagcataggaataactaataaaacaatattaataatgaacggtataatttataaagcaatgcaatataagtaaaacaacataattttcacaatatgggattcaacatgttcaaggtagatatgacttgccttgatcgctcacaaagtcttcggcgtcaacggcgatgaagagctgatcttccggaacggcaggatctacacgaccaacgcgaagaaatacaaaaggactaataaaaaccatatgaacagaagcaataaagcacataaatggattctactcatttttaggagaaattagagatttgaacgggtcgattccgagttcaaacggtcaagatatggccatttgaagtttaggtgttgtttaaatggaaatttgcaattttgtgaattatttttctaaaggaaattgatttattgcacagagaagagagagaggggtccacgggcgggtcccacttggcagccgctcggtccactgtgagccgagagcaccgaggtggctcacggtgcaccgaggcacagacacggccgggcaggagcagcacccggccaggcggctcgccggcgacggccaacggcgcggcggcagtgcgacggagagcggaaaggggaaaaacggaaaggggaggagacgacggttctcaccgagcagacacggcggcgagaggtcgacggtgttgccggcggtgaggaagaaacgacgagaagcttcgggtcgtcggcgtcggcgtcgttcccgcggtccttgtactcgacggaggggtggacggggaagaggaggaagcgacgaagcggatggtggcgacgccgggctccgacgaggtcccgaccaccggcgaggggcggccggagttgcgacggcggcggcacaagaagagagcggcgcggcggccgcggagagaggagggagagggcagcggtgtgaggggagagaggagggagtcgggggtcccttttataggccggaggggagggagagaggcgccggggagggagatcgacgcggggcatggtggagctcaccattgatgagcatcatcaaaatccaccacgaataatgtgggattgagtgggaaattatgggggaattggagaggatgaggtgggaattaattcccctcaattaatttgatgaaacggcgagtggaggaggcgaatcggaggttgccgtcgcttggaattcggccggagagagagaggatggctggaggttagggatgacgagtgggacccacctgtcatcgagtaggagcacgcctgtcaggctgggcgcgcaggggaggtgaagcagacttttgtccgagggagatggggagcagttgagccagcccaaggagagggagggggaggggagagagggagggtgagggggcggctgggctgggctgagaggagggggagagagatgggctgcaaacagcccaacaggaggaagatgatttcttttagcttttcctttttgtaaaattctttaattgtttttgttgccttaaaattatttaggatgctctgaaaattcaagtaaaaattggttaaacatttttaagcatggggaatttattaaaaatacccacaagccaatttgacataaatcttggtgaattttaattgttggaggctcttttaggcttttaaaatttctagaaatgcattaaagcacgatttaaatttagggcgattttcagggcgttacagtgacgcctacccgctggtctgctcgccgacgaccacgtcccaccgcctcgctgtcccatgcctcgtcgggtcgccggctcctccacaaggacctactgcacactaccgcatgcatcctgacaggattcaccccaaacacctgcaagacaccgacatactcctccggcaccatcaagatttgcaaactagtacaagcgtgtatccatctcagggacagagaaagcaagcacaaccgttcatatcgatccccaacatgaatgcttctttgaatgagacaaaagaaacaccaatcaaacaagagagcaataaccatgcgaggtgatgtggatattgaaaaaaaaataaggaagagcaaagggagatggggactgatttgcgaggaggaaacgacggtgccaccacggcggagcacaagtgccggcaggatcgttgggaaccatgcggtggccgtgagcggccgcagccgccagggatcgccgcgaaggtccagcgcctcgcgcaggcggtggcgaggtcgtgacctcaccgggcaccagccgaacatgtggggccctaccgtttcttcctcctcgtcgaagctggagggaggtggaggcgtagaagctgcagaacggcatcgctgcgcggcgacctcttctcttccctccgattcgagcagaggagaagagagtggggagaggggcaaaatcgtctcatcaagctctgccccaacgaaaatgaaatcgaaaataaagaaaatggaaaagtggctatggttgtgcggtccatattggcattttaacaatcgcggtttcagaatagcattccagtgttttgagaatggctaaatatccattttctccctggagacagatcaaggaacaagaagagagacgtggcttaatcctatgcgtagaaaaagacacaacggttcagattaggtgaaaatccaactcccgtctttcccgaggcgggtgaggggggaaagagagaaaaaaaaaaaaaaggaaacctcaaattccccattcttcctcgtcttggggcacaactccgatttagggttagctcctcctcctcctcatcgctgattaggattcgattcgaccggatccctcgccgccttcgccatggatgatggtgatgagcccgtcccctacgtcatggatgagggtgtgctactacccttgctgtttccgccgccgctgccggccgacgacgacgccaccgccggcgtgagcccaagctgggtgtacctcgaagacagagcttacgtctcccccgatgccgtctccaactccaccaccgccttctccaccaccaccaccggcgtaagcatccatgtctccttctgcctcgcccgcccgccgcgcctctcctacctctgcgtccactgcccccgccccggcgacggcgagggcgcctaccggttcactgtcgatccccgagtcctcggcacgcacaccgatgtagccctcctccgcgtcccgcaccccaacgacgggctccaccgcggaatcaaatcctacgactacttcgtctacacggcccgcccaggcccgggcgcctccttgctccggctgctgccgaacccgcgggtctcccccttccgcaacgaggaggtcgccatcgtccgctgctccggcggcgcccgctacgtcatcgcctgcctcatgccaaccatcaggcgccccatggagttcaaggttatgcgcttcgactccgacgtcggccgctggaaatccacagctgtgtccatcagtgagccggtcgagagggacagggtgctccccatccctgacacggccagccagatggtcttccactgcaccaccaaggtcatcacgctcggcggcaccatcggctgggtggatctctggagagggatcctgctgtgtgacgacgtgcttgaccaacacctggtgctccgcgacgtgccactgcccaagccagcgagaagcaaccgcaaatccttctgcagagggccgccgcatcattaccgggacatcaccgttgtcgtgcaggactctgttcccacctgcatcaagtacgttgagatggtgacccgccccggtgatcggccacctcctcgacaacgacagccgccgcaacattctgatgactctgactctgatgaggaagaggacgttgcttactactggaaggctaacatatggagcatgccgataccagttggttcatgggaggattggcagatggagtgcacggtggatgtcactgacatcgccgtcgacaatgtcaggttcagtgagctgctgccaaagattggcaatgatccagaggagacattgaggaggctggtcacaggtttccccacattgggtatggatggggatgtcatttctttcctgtccaagatcaatcgcttggatgataagggatgggttatctctgttgatctgaggagtaagacgctgcaaggcgtggctgagcttgatgagaggaagaatttcctcttcaagcgctactacaacaccagtgagatctccaaatatcttatcaaggctacaggtttgttttataactgttgcaccataatagtcaaataatctaatggatagttcataaccttcttcattttgactactgtttacaagttgtcaggttagaaacttgattcatgagtgtgtttttcagagtgcactcctaggatttgtttttgaagtgccacttaaaccctctctgtgtatgttgtgtgtttgatgcaggtgaggcaggaactcttgtaaaaactggggttaatagtagagtctcaaaaaagaagaagtaggaattaattaatgaatcacgtaggctacctgggttgaagaaatgaaacgagctgcagagactgggcgattcatgagctactttctgtaatgagctattatcagagttgttctgtgcaagacatgctactttctgtaatggatttggttttcgtctgtttatcccaagttaaactgctatcttcccctgatgattggcctgaaatggatgctcaggaattttcttcggttattatactgtaataaaatgtcaagctggcgaccccatcgttagagttcgtgttttacctttcgttttgtaatgaactctcttgcttttgggttttcttcaaaagcaagatttcattcgaaatcagaattttttttcttcaaaaaatttcgttcgaaatatcagaatttgtccgaaatttcggaatttcggtgcccaccgaaattttcttgtttcccgaagggaaaaccctggctggaggactatccgtcggctggcgaggaacggcggcggagctccggctgctgtagggagggaggcacccgcgtgccggcgttggatttgattgggcctcaccgaaatttcggtccgaaattttgaacaaaatttagttgaatttgaacaaatactaccaaaattcatgaaaaaattcggtcgaagtaatatcgtaagaaattcggtccgaaatttcaccctgatcgcaattagcgagcgagataggcgggagctcggaatgcgtgtggggtgggcgcaatccaatccaaagaggcgttcgtcgatctccgatcggatcgtctccgtgattcgccatggatgatgatgagcccatccccttggatgacgatctcctcctgccattgctgttttcgcctccgctcccggccgacgacgatgatggcggcggcgtgagcccaaccccaagctgggtgtacctcgacgcgagtgcctacgtctcccccgacgccgtctccaacgccaccaccgccgtctccaccaccaccaccggcgtacgcatccacgtctccttctgcctcgcccgcccgccgcgcctctcctacctctgcgtccactgcccccgccccggcgccggccacggcgaggcctaccggttcaccgtcgatccccgagtcatcagcacgcacgccgacgtagccctcctcctcgtcccgcaccccaacgacgagctctaccgcggcatcagatcctacgactacttcgtctacacggccagcccccgcccgtcgctccggctgctgcccaacccgcacgcctcccccttcagcagcgacgcggtcgccatcgtccgctgctcgggcggcgcacgctacgtcatcgccggcctcatgcccaccatcaggtgccccatggagttcaagcttcagcgcttcgactccgacgtcggccgctggacctccacggcggtgtccgtcgacgagccggccgagagggacagggtgctccccatcccggacactgccaccgaggtgctcttccactacaccaccaaggtcatcacgctcgccggcggtgaccacgccatggccgtcggctgggtggatctctggaggggaatcctgctctgcgacgacgtgctcgacgaacaccccgtgctccgcgacctgccgctgcccaagccggcgaggaggaaccggaaatccttctgcagaggctacccacatggttaccgtgacatcaccgtcgtcgtgcaggactctgctccctcctgcatcaagtacgtcgagatggtgacacgccccggtgatccaccacctcggcggcgacgacggttgattgaacataattctgatgactcggattcttctgacggctcagacgaggatgttgcttactactggaaggccaacatatggagcaggccgataccggctggttcatggaaggattggcacagggagtgcacggtggatgtaaccgacatcgccgtcgtcgacaatgtcaggtacagtgagctgctgccaaagatctgcaatgatccagaggaaacattgaggaggttgctcacaggtcaccccacattgggcatggatggcaatgtcatctctttcctgtccaagatcggctacagtgatgataagagatgggttatttctgttgatctgagggataagacactgcaaggtgtgactgagcttgatcacaggaagaattccagcttcatgcgctactacattaccagtgagatctccaaatatctcatcaacgctacaggtaatttctagttgacctgtgttgatggggtattgctgtatttattatactcgagttaagttcaatagttcatgacttgttcatttggagaagggttcattttgactactgttagaagttgacatgttacaaactttgattcatgactcttgttttttttttttttgggggtggggggaggggagagagttcatccatgactgtttttcagggagcacccctaggattaacagtttcctctaggctttatgtaattagtagatgctgaccaaaagtaacctgaagtgaaacagtatttgaaaagcatacgaacggtattttttttctaggtaaaaagataattctattactgtcagaatgtactagtttctgtttaatgatccggtactgtatgggcttgtttagatcccctcgtaaaatttttcaccttgtcatatcgaatgtttagacacataaaattactaattacacagattgtgtgtaaatcgtgagacgaatattttaaacctaattgcttcatgatttaacaatgtggtgctacagtaaacatttgctaatggcagattgattaggcttaataaattcatctacttttaatactttaaatatgtatccgtatattcgatatgtcacgctaaaactttacacctatggatctaaacaccccctatgttgccctagttattagggagcaagaaaaggtgtaaccctttctgttgtgtgtttgatgtaggtgagacaggaactctggtaagaactggcgccatggagtctaataagaaaagaaaaaagaagaagaaatcacgtaggctgccagggggaaagagatgaaacaagctgcagagattgggcgattcacgagccgcttaatttttttttatcagtgatattctgctggatgatttacctgcctaatggctaatatgttatgttcaagacctgctactttctgtaatggatttggtttttacatatcaatcctaagggagtgtttggaaactaggaactaaatttagtgcctctcacaaaagtacaaatccctatggtagggacttatgtttttgtgagagggactaaagtttagccccactttagtccccccaaccaaataccacctgagtcatttcttccttttatgtttcctacttccttggtaagacgaaggaagcagcatgtctatattagtccatgtatatgtatgcatacaaatgcctctgccgttaagggccagctcgttattattagatgataagtacaagaataataattttggtcacacaatgcaagcaaacgtagtctcgttttgtaatgtagcagacagagccatctgtaacatagcagacagcatgatgcaagtcaagaaagagatggagatatacaactattataaccggctcagcttcatttcatttcattccatggctactaaactacatcatcatgacatgagatcgccatcacatctccagttggatggagcgctacttaacagtcaacagagaacaagattaaatgtgtttgccctttacagaaaataccaacatacaagaacgattactcctacccacatttcccacaatgtccatgacaacacaagtcagtcccagacggtcgtgataacttctttgaaggatggcaggaatggcgacgaagaaatgggtgtcaaaaccaggccaatgggctccagaatcagcagcgggtagagaggtcaatcaagattcaagggtgctaaggaatgtacaccgcaatgccaagaataacaatccctcttttctttttcacatatggcttggccgtcttttgccactatcagtcctcgatctcttggtaggtttagcccactggatgtctccaatgccgggtgatgaactccccccacgatcagattgctgcacagaatgagcaccccatccagctgaatgcatagactgctgagaagggtgtggatctctttggaagggcgtcctggcacctctaggtgatggcgccggtcccatccgcccggcgttggtcggggagagcggtccagttcggcctgaactggatggagaccccaggctcggccttcgatctctcttcttcttaactatgaacatatctgtagggtgcctgaacagccctgcgctatccgtgaactgttccctgctacctggtccagaatgccgggagtccttctcagattttgaagtgtgggcccggcctgaaacctcaccaactggtgcatgctgattgtgtctgctagtgcttgaaccatgctgctccgcttcactggtgcttgaacgacgtttctggcctgaagcagattgctttgttgattgcgcagcagagccacttgcacctcctccaggattcgaaaatgacatagcacccttagcttctctgaagtctgagtccggaaaggcaatcttcattatattgaaaaataagttgtggagggtctcagcttctactcggacctgcattttgtaggagcaaattcacgagtacaccagtcagactatcagaagttagagaagtatgaattcacagaattagagtctgtgcaagtatgtcgtggtatcttattctattaagtcaacatggttttcttcaggaatacagaaagctacgcagttcttctgaattttaaatagtaatcagtaccaagtagagagagaatgtcaacaaacttgatggcgaccatggacccatggtgtcagcattggaatgacccccatgatacttcaatttatacaaattaaggacaaaaaaggaagcttttctagtactatgaaattacctcatgcctatagctgaaatgttgaaccacacttttcagcatctgctgcatgtcagctatgaattcattcacaccgccatactcaaatccatcaactcgttgttcaattttctgtagatcaagggtgctgctagccaaacctttgaatgaggaattctcgttcctacgccaccaagaagatatatttggtatgatttgatgaccctctttgtcaatcctcctccaaagcttgtttatcacgttcttgcactgcaggtattgaatgagaaacgcttagctataaagagctgttaaaaaggcaaacaatacgagccaaaccatttgcgaaaggaattacaacaaaattgagacaacctcaacattaagataagctgtagtaataaatgatatccaaaaactacactagtaatcagtgtaagcaaaagcagtcaaaaaaaaaagaaggcaaacaatatgagccaaaccaaatggcaaaaggaatctacaacaaaatcaacacaacggataagctgtagtaataaatgatatccaaaaactacactagtaatcagtataagcaaaaacaggcaatagtcatgaaatagtccacaccacttcacgtgcaccccacaaccactgcacgggacttacgttgttatgattgtagaacaatgtgaaaacaccacatgaaataagcggcgtcatacttggctcttttgctaatgcaagcagatagcagtcgagatttacctagcaatgcagtatatttggtagacctcaactatcccggtatgtaggcaacatttaacttccatatttatgttatcaagttgagttaacagtccgaataaatattttacaagattttaggcaagtattatacttctatagaaaactgcagatccatttatgtttccaaggtaaaaagaacattgcttccttgatatattgctcatctgttctagttttccatgctcggcaacgtttaacgagcagggaccaagccatgtgtggtggcagtttttagctagcgtttgtctattgcatactaaaatggtctattcctacatttggaaggatcatggctctgctattttgaaggcggaaccatctttcttaagatgatgcttacacgacagagtatactaaattctacaaagtattccttgccgaagttcaatatccaatatccttttaagttttaaaagacgaggcaatgagtagctctaacagagtaaaccagctgaaacatacaaagaactaggttttgtatgctacctttctttgcatactgtcagacatctttgttccacttgaatttggaccagcagattctatcaccttgttactccaattttccttagaatgttcagcagatccctcaccagatccagacagctgagtcattttcccagccttagtggcagggggagcctttctagatggcatgttacgcttttgttttactgtccgatgaactgtgtcttgctgcctggaagcaggatcagcaaaggcttgctcagacttaaattgtgaatcataatcaccatctccttgaaatgcaagatgaacaccacgttgagggacggtcccatcaccggatctatcatccagtttttctgcattaggtcttggacgaatacggatactccgcttgcgctttatttttggctgtactacctgttcatcctcaccatcatctcgttcatgattccagctgcctgactgctggagatccagatgtgaatcccctgataatgcaatttctccttcctctaggtcatctgcctgtaaaccgtccattaaaaaaatgagcagttaatttcaacacgtagaaaatcaaattaaaacaggaaaaggagaagcaaataagttcagaagtaaaggaaaagaataggcaaatatggtgtgtttcagacatacagttctctttgacaaagcacccgggcgggaatctaatgcagacaaagaccgcaatttttttgaagaggaggaaggtgcaggtggtggcaatctacggccaccagatgaagatcctgttgaaccagcttcttcagatctatgggcttttctgcgtcccatcccatgtgaaaaatcatacccttcatcattgataggctcttcttcctctgattgatccttattatcaggcactgaatcatcattgtcctcttcatcttcaaattctcctatttccccttcttcaggcagagatgaggtattcctctcttcagaatcatcatcagattcctcaaaatcgtcatcatcaatctccctgtagatggagtacttcccagaccccttaggtcgcccccttcgtttctcaagtttttcattagtgtcaagagaaattcccccagccgccatatttctcaagggctttttggataaactcgcaacaacagcatcaagctccgtggagctaacacggagccacttgggagcttgattgtgtttcatcatatctcctgtccaatcaaattcttcatccatctgatcaaatagctcaacttcttcttcagtccgagcaatcatgcggttaacttgctgtagtgaaggaacgtcatgaacagtttcttgatatctctcttcatcatgcaggagtgtttccaaagtcatccgcctttcctcatgggttgttctttgatcaaatcgaccagcattaatgacttcatctgccatgtcaattttgtactgttggatattattgcggatgagactttctattgaacccatgtacctgtcctttcccgcaagatcatcctccagatctccacttcccccattcctcaactcatcctctttctgataacttgagatgttatcaacaacagcctccatgtaaataacttttacatccctagtctgccctatacgatgggccctagcaactgcttgctcttcattttgtggattcggatcagggtcataaattacaacagtgtctgcactctgaagattcagacccctgccagcagcccgaatactaagcaagaatataaaacaatcagaattaggcctgttgaagtcaacaattgctgattcacgatcttccaagctagttgttccatcaattcttctgtaaacaagttgcctccattgcaaatattcttccaggatgtcaagaagttttgtcatagtgctgaaaaggagtacacggtgacctgacctatgaagcttaattaaaatcctatcaagattccacaacttcccacaagatctgattataaaatcttttccatagtaattcataaaaggatatgacagcaatggatggttgcaaactttcctcagctccatgcatttgttattgagattcttatatgtcttagcctggtacattgcattcctctgaatacgtgctttctcatcttcaggatcaaccctgatggtgccagtggattttatccaatcatatatagcaccttgaataccagacattctgcacctcaaaacaattgactcctgcaaatgacatgacgagttaacaatgtagcaaacaaaaagagctgagtgacaaatagcatcactgagtgtgacaagggcagaacaatcgacctttcttggaagtgagccttcaacatcttcaacacgccttcgtagcataaaaggttccaaaatttgatgcagcctatgaataataattacttttttctcagtttccagccaatcatcttcttcttcactatgtgtaggaacatctctctgaaaaggttttgagaaccaatcttgaaatgccttacggttgtcaaatacttctggtagcaacaaatttaggagggaccaaagctccttaagatcattctgaaagaattgaataaaaagcattaaataatagccctaaagtgttatagaaataaaacaacatttgctgatgtggtcctaacaatattggcagaccagagaaaaggaacttccgtgacacaggaaaagaaaaggggattgtgttacaatgtagaacgattgtgttacatttattattaatgcttacctgtagaggagtgccagtgagaagcaaacgccgttggcaacgataacgatcaagatctcgcgccaagactgactctctgtccttcatccgttgggcctcatcaataataatgtacttccaatcaattcttgaaagcttggaacggtcatacataacaaattcatatgttgttacaagaacattgaatttcacagccagaacctcctgcaagattaatcaaaaagaatattgaagcaaaatccgtgagcaggtggttccaaatcagataatgcattagtaagcgggtgattccgaagtcagagaatacatgatttacgagtgttatccttccagaatatggatcaaacaatataactaggaccaccaagtatttaagaaacatttgtgataacaatactgttaatcaaacagtgatctaggagggaaaggtattgtgaatcttttcaattctataaatgctaagcagtattataagtccagatatagcataaaataggctataaaacggaagaaacttgcctgagagaataatttttgacgttgatcctttgcaccaacataaaagatgcaagatgcagatggcaaccagttcagcaattcactctaaatcaataatagaaatccaagtaaaaaattatgtttcaaaataaatatccccatcataaaatagatacaaacagtatttcctcagagtaaaggacaggaaaatagaaccttccagttgaccaagacagcattcggtacaattatgagatgtggtccataattccctttaaattccatcaagtatgcaatcagagacataacctatttattcaattggtggccacaaaaagatgttactagcagggcaaaaggaaatggggaggcaaatgagataataaaagaaaatattgtgaaatagcaaaagtctagcaggtagaacggaataagaaatccacacctgtacggtcttgccaagacccatctcatcagccaaaataccattcaacttattattgtacaaggaaagcatccattgaaggcccacctgtggataggcaacaaatcaaattgtagattttttttggtggttggaaatagacttgaaatgttttaaatatatattatatcatataagaaaattaagttgaaggtaaatggcctaccagctggtagtcccttaacgttcctgctcgcagcagtgagggctgccttgtaactctctcattcacagcatgagccaatgtgtagtacctaaaataatacggcaagtgtaagcttatttatgctgaaaactagtgtgcactaaatgcccatattgatctacagttagcagctccaaattagagagtgaagcaaatttactcacaggagtcaaaagcacatataaactttacttgtagtgaatcagaaacataaattgtcaaaatgaatattgaaaataagataattacttacttattaacagatgtgttttccctgggcgcattcatttcagagaatgtgttccttatcataacctcctgaccagcacattgtgcagcagccttcacttcttcttcagaaagaccctattaaacaagtggtatgctcaattatctacaggactatgaaacttggggaatgaatgcatcagtgcagctaaaagttatggaccagtagtgtataagtgcaatgatgaatgagggtacagataaacacaaggcaagaagtgtattggccagtgtactgtctgtacccccaacctcgaaattaaaaagtttgtgctaacatttatcgtttgcgtcacaacccataaataagaaacaaaagagggatggggaaaaggccgttatcattttccagagcaaagaatgtcatactcatacctgtgctcgggcagcagcagcagcagcatttgccgcctcttcaacttgctgatgattcttggcagcagttattttccctccaagtttatagagatactcctcagtctgggtcaagaaagaagatagaacattgtatctttgagctgcatcgccaggaacactggtttgttgttccaataatatttgacgatatctttccacgtcattgtttttcagtgcctccattcttttgtttcgatcatcatcctttttctttgagaattccctcagcatcctttcatggtacttggctacccctcggttacgagtaatccgtgcatcacgaatggcccagtgtgcctccaaaagcttcttgcgccactggaaaatggatttgagctgcttttctcttgaggctttctgcatctgctgaacttgccttgtaagctcaacacgctggcgttcacattgtctgacaaactttctgtacaccctatcaggcattgccattatttcttgttgctcctgttcaacttcatccctcatacgagcctgaaattcaaggagtttcagcttcttttcttcaatctgcagccttaaaacaagatctggttggatccttttcctctctagattaattgcaagcaagccactgatcttttttaaattatcctcccgtttcttgccaagaactatcatgccttcctgagctaacaaatccttcacgtcataaccgagtgctagattactgttgtaatttgcagacaccatggaatcatgtttcctggtaaaggatggaaagtcaaatagtggcccatggtattttcttgaaacatctctgttgggagtaggcacgctacttgatgaggcagctctttttgcctgctcagcgtctgctgaaccactttctgctggcaaagatttccccctttcaccattgtaatcacttctcccaggtgttctctggatacccctttctggatcctgctcagatttaatcagggtggtgttggtttgttcaggcattgaaactggtccaattctaagaggttccttgggtgaagctttcatcacttgcatgggaccactagcaggaatagttttgtcttctggagcagaaacctccacctttggtaaacagggcgccttcaacagggaagatctttcaggagctataccaccactctccacaggtcttccatgttcatcagcgctgcttgtagcagatctttcacggtttgttactggaggtccagaaacctgctgcgcttgtgaatcaggtggtggtccagacatgattaaatcaagaacttctggtggtagcttcttatcaccacgctgagatcaaccaatgaaaaacagaaggagatttacagtattgggattagtcagcttgaatcataacttaaaattgtggactggaactcatttaaaaaaaaaaagcaaagacacgaccaaattttaacattcctgtaccttcagacgccgaaaagctaatatctgagctttaagtacatgaagctgatgtttggtgaaacccataggtggtcgggcagcttgatttggggcctgtgatcctcctgtttcaccagaatttgctgaaggggcagtagctcggttagcctgctgcaactgtcttgcatattgcatctgcattgcttcggaatttgcattttttggattgggctgctcaggaatcttgtttgcatgtccagaactttggggcatatgcatcatttgtccaccattgcccattgacatggctggcctcgcagccctgtcattcgagctatctctgttatgagctgctaactgttgttgcatctgcatgttgctcatattcatcatcttaggctctgccccaccagaaacagaggtgcttggtggaagaggctgtcggggcttcgatggggcaccctgactaggaaaattactatgtcctggtgcatcattgttcatctgtgagggtacagactgctgctgtgacgccatgcctacctcattctgcttctgcatggcagccattctgtttgactgcaacattggtaggatttgagaaatgagagtcacatttgcaggattggacaggtcaacattgtgctctttggcccaggcctggatagcttgaagttgggccattgccatcgggttagctccagcattgctcatgccagcttgcccttgcattggctgcatcggcctcaccatacccgccgatgacaactgctgcccagggaccccttgtggtggcatcgaaggtggcctcatatcaccactcctttgctcgctattgctcggctgcccttgctccgcctgcttctctgcctgttgaagatgctcagattgttgtctcttgaacatctgggcctgggcctgagcctgaagggacataagctcctgcatttttgcagtgttggcagccacatcctggtcccttgtagatggccctgccatattcatcttggcctgctgttgctgctggaggagcatcccatgggccttctgctgctgctgctgcatcatgtactgcaggtatgcttgctgcatcgccgtcgggttatgctgctggcctccagccagaccctgcggtccaccgggtagcggcatgttcctctggccctggaacgggggcattgggcctgaggacggagggaaactactgctgccaccacctcccatcataccatgcggcgcgcccgatgggtacccttgctgctgctgctgctgctgatcatggtgatgcatcattgcctgcaacaacacaagccaacccgtttagaccaaccacgcaattggagcattccatcaacacaccaaaccaaacccatacaaacagagagacagaacgaaaccaaaatgccccccaaaacctcaacccaaatcagacacacagacggttccaaacccaaaattacacggaaattagaaccatccggacaagcatcagaaacagggcaggcaaaaatcacatgaggcaaggcaaagccaccacctcgcagtccagtgagtgggagaggacgaagctcgcggtttactgtttagggaagggcgcgtaaaaaagcgccgccttttcgccacacgcgtcaggattttttcccaaatcccaacggccacaacccacggttccccaccaatcacgtcgcgcgcaggccgcagtagagaaaacctcaaacccccaaaccacacaaaaaaaattcgaatcccaacgccatggtggggcagaccagagagagcccagactcacctgattcctaaaccctagctgctgctgcccctgcgccaccgccggcggcggccgcggcgacgtcgccggcgagcccccggaggaggggggtgcctcgccgggctgcatgtccgcgaagagctccctagatctggccgattcggggctccctcatgcgagatctaggtcgatcgggtgccccccaccgacgcgcggcggcccgtgggatcgccgccggagacgctcgcggttgaggcgggggcggtgagagtgtcaaaccctaaccaccaccacctcggttggtttcgcggcgcggattttcctctccgatttttccgtcggattcgtcgcgtttttttttaagagagagagaaggagacaggaggaggttggagtgtgaggaagaatggtaaatttgaaagaggaggtgggcttttaagctaaaaacgggtagggatatttttttcgtttaggccccttatattaatgatatttgcatgatatgagtgtactaactcgggtttgtgtatcaacaggaaaggaatatatccatgtttggttaaaattaaatcaaggctatagaattgtaatccccaaattggaatatatcctgtttggttaaaattaaatcaaggctgtaaaattgtgattcccaaatctccatttcaagctggaatttaaccattttccattattaactttcgatcgaagatatggtttggtaggaagcaagaacatattgaacagatcggaacattttctctagataacaaaagcacacttccgacctctgcatcgtgatatattggaatatctaaccatgggctttgaagaaaaaaattctagaacaattgagtaatatcaaccgtatttgattagcaaaaataggacgtggtcatgaaacaaatttagaaaatagaagaacagactgtagattggcaaggaatatggcaatttgtcacacacatggttaactgtggatatgtcatactagcatcaatttctcattgctgttgatgatgctacaactaccaggactgatactggcgaagactcacatagagcaagcaattaaggagcacaaacatgcccatactgaaactgatctctctatctctactctagatcactcggtcgtttcaaaaaaatttggatgtagctggaacttgatccagtgtttgtcgcatttggaactttgatccggtgattaacggaaattgtcgcatttggaagttggaggttaagtacctgtcacacttgtctctgtctgaaattctgaaatggagtatcttgacccccaatgaccggtataatccgattcctaatttcgcacttgtattttctgcaaggagagaatcacggaaatctacagtagcgtttagctgccacagaaaacaacagcaagcagcagagtgatgaatgcgtgcagttatttttgtcagctgtagtagctgtctcttcatcctcgggatcagaaatgcagttactggagtactcctattttgtcagtattccttttttgtgattaatgacatattgcctgaaagtcagtgcagaaacaagttcgttcccttgatgtttttctgtgaccggatgaaaaagaacgaactttgggatcggctacttcaaacctgactgaaaactcgatctgatttgatggacttaatctgaaaaaccacctcaaacaaaacctccaaatttctcagttgtgtcatgtttgaaatactactggactcagcgttttgtttatggttatgcttattcgtacgtcttattagtaattaaaaagtaatttgtaggtatttttttacatacgtgtccttagcaatttaaaagcaaatactagtataaaatgaactatgagaaaaaaaacataaaaccaaaccccgaaattaattttaaaatacaaatttttacttataagtgtaagcataagtttgaaaatgataggatcatagtacctttttattgcatgatagctggagaacaaatagctcaagaaatgtgtcttggctcttgacaaacgactagatacaaactcaagtgctattgtatctgaatctgtatgcctaatttgttgtatttgttcagaacatcataagagaacatagctgggttattaaggtttacttcagaaagaaagaaaaaggttacagatgccaaaggattgaaattgccctgctagcaagcaagaagctacttaattaggacacatcactgaattaatcacatgatgaccatcctagctatagcttcctccctccctcggtcgccgtcgtcgatcgccggatgccagccagcacgccggagctcgccgccgacctcctgtcgccgccgccgccgctcgccgttcgcagcatgcatcacctctcgatctccgacgacgcatgaggaatcagcagtacacaccccctgatggaagaagctacattgcaatcagctgcatgctctctctgaatctgatctgaatttacttctcagctccattctgcagcattagcagccatggcatgatgaatttatagagaaagaaaggattgtggcgaggcggctcgacccagggggataaactcgaggaatgaaacggtggcgaggcagcagctatagctgccactggcatcttccatggatatcctcaccacaaatgcttcacagttcactccactcgactcctttttttattaacatcagaaaaatgatttgcttttccccccatgctctcctgctcctctctctcgatcgtgctttatttttagtggaacaccattggttagctagtgcttctccttttttgaaaaaaaaagatatatgaatataagtaccttgtgccttttctgcttttgtttaatatattctctgatacacttcaaaaatatatatattctctgatttgtgtggatgcatggggtttatcttttgttgctccaacctgattatgtattattcagtttcgtcagacatggttgctatatgtgttagtactatttctcttcctgtagttcaggtgtatctgaattaattttgaaagtaagtgtgtcaagaattgcctagttgcaagttccaagatatattatacatacacactccacagagaactttccggatatatggtaattaaaaaaaaagagtggaagagatatgcttggacattcgatttggaggaacagttgagctacatctgtcagtcggtgctctgttgcatcaatattgctctaagctgggctcttttggaacgtatatatcttatgttattttcatagaaattagttaaattcccatgcataaaagttttccaaaaattcttaagtcccaatgatgcctatgttaagggtaccgtacaaaaaagttaggatggctataagaagctagccatcaatgtgttgtaattaagatagaaaagccaaatatttccaactcttcattcaatccaagcagaaggtgagagatttagtagtcgaacttagaatgcatctttcacaactggaaatagaaagtttaaagggggagttcttttgtattcgaagggggagataacgttgttatagtccaacaagttgtacctgtaggtaccaaaacagatctagccgtccatttccgaaggggtagtatagggaaaaagaatgtgtagagcttgtgtgccgaggcgcgggagggcacgcaattccctttcgtgctcatacacagctccctcgtccgcctcaccgcacatcgtcggagccgatgccttaccgcccctggcctacttctccaccgcgtctggcggcgtgggagaggaacaagggaacgacagtgacgcgggagaggaacaattccagcggcgccgcggtagaggacagcggcggtgggagaggcaaagctcattctagggtttatgttcagtcttgcattggcacgcaaaattacattactgcccttccacctacaatcatcacacggtaccacatcagggacaaaactggtaccccgcgataccaatctctgtggccatgtggccattggagatttgtccggatccaacagtcaagattcgataccgcaaggtaccgttggactgtaaaaatcctctggacaaactgttgtatagcacagtaatagcacaacgactttgattcttttaacatactgcaggttgttgcaacttgcaagtacttgaacagggaaattaagttgatttaattgattaatgaatcatacataattagcctaaccacatgtagtgccagcatgcatctgcatcaacaaaaaaaaaaaaatggttggtcggtcacacattctctgaggccaccgtcgacgccggcaggagtggttgcttcaggcaagaatcagcagcagcagcagaagctggttgctgctggtggtcagcaatggcggcagcagcagaagcttcttttgcagcagcaatggctctctcctggctcttcccccacagcaccaggtacagccctgccactatcagcaccgccccaatgatcctgcatgaacagattaaccatccaattagcactaatcatttactagttcttggatcctggatttttttatttattttttagactttttaatttttttaaattctattaatagatcttttttaaaaaaattccgaaaactaaacctcttaaccaggcgtggcagcgttattttgccacgccaaactgacatggcaggacaacgctgccacgctagctgtacttggcgtgacaaatttatttgggcggcgtagtcgaaaagtttagatttggaatttttttagaaaggtctattaataaaattaaaaaaataaaaagtctaaaaaaataaaaaaaatcttaatcaagagagattaatcggtataccctccgaggtggaattgctcgccgaggaggagggaagccatgacggcgacgaggagggtttgcacgggctggtagacggccacgaacacggggccgccgcggtggatgcaccacgtctgcacggcgaaggcgacgcccgaggcgacgaatccggcgtagaggatggtgaagagctcggagccggagcggacggcccaggcggcggcgtcgcgctccaggaacgcggcgatggcgaggaactggatgaggccgaagaagcaggtgtatgacgtcaccgacagcctcgccgggtagcgcttcagcaccggcgcctgcagcaccagccaccccgaccacgacacgcagtgccccagcaggaacacgcaccccagcgtccagctcttgttgccggcggcgacggcgacggcgagctgttgcggttgcggctggtggttgtggtgggtgttgaagatggcggggcccttgaagagcgtgatgacggaggcgccggcgacgcagagcagcgtgccggcgaccttggcgaggccgtcgcgggaggagaggcggacgcgctcgatgcggagcgcggcggccatggcgaaggtgatggccgggacggagttctggatggcggaggcgaacgtcggcgaggtgttctcgagccccagcaggtagaagccctggttggcggtgatcccgcacagcgccaggaagaagaactgcaccgccaagctcgccgtcatggccggcctctccttcctgcaagcatccatgattgattgattgattaactagttcatcattcgtatcaggaattcaggattagcggcattaggcatcgattaattacttctcgaggaagtaggcgaagggggcgaggaggaagagggcgatgaggttgcggtagacggggaagacgagcttgctgacgcccatgtccagcgccagccgcgacaccacgtggaacccggcgtacccgagctgcagcgccagcatcgccacgtgcagccgcgcgccgccgccggacgccgccgccttcctcccgcccgccgccgcgtcccccatgattgtcgtagctgggctagctagctcgtcgagctacgagaggagagctgagctgaagcagtgagactgagactgagactgtgagtgagttctgctgcacatggcgggcagcattggctgctgaatttatagcggcgattggatcggaaaaagacaggtggtgagctgtgcttctgctgctgctgctgctgcaaatggagttgagctcgtgtacttttctgtcgtcttcttgtctctctagctgctggagttggagatcacaacctgatcatcagtacagtacaatactgtacctgacccagctttgctgtctaccgtctaccacagctcaaaagtctgaaaaacctcttgaatttcgaaacttaataattgtatagttaattttgggggtcctttttagtggtctacttttaacattggcttttaaaatcataaataatccggatataaaagttttatccataaattatttttccgttgcttcgttcatatttttacgctttatcagaatagagctaagagactgaactctctgaatctgctaagctaggctaagtcatctcagctcagtaaactgcctgcaattttgtgccatctccacatacagaaactgatactccgatctttcaggttcaagtagagtccatgttcatgaatcatgactgaaatctcaccaaacaggatgcttttaagggtactgatcaaggtgagctttagttgcccctgttcatcataagagtggttgaatgaaccatggggacaaacacagtgagaagagaacactgccaaggagtacagagcatcaaacatggtgtcaactcatcttcctcaaggacagacatcacaggtacagcatctctcttttttaagacctgcacctacatggatttttgcaggattatcctcctaattacctctgccatcttgtatatagtactagcttgaggtaaatccattgtaaaattgcatttgaaggtaaatataaatttactcaatctatgtttctatatttaaatgcaatgacatgctctgcatattatggaaactgaaacaaacaaacaaatcagagatcaagcacaaacatatgcaaacacagaatatcagtagtaacccagattgagtactatccttcaacattttgtgctcattccacatgtgcaccatggtccatggggacaccctgcaggcttccatggagacaggacagcaatccactgcataaacagcttcctcactcaccatccattactgaattctgaccagtaaagtatctcaatccttggtggttacatatactgttatacacgcatagcatgtctgtctgctgcctttgccttcacactgatgtttcttgtgccctgccattgcaatgcatgaccctgacagccaccatctcatctgtcatgctgatgctaatctggtcattctatgttctgtctgaaatggttagcctgtcaaggtggttatgccatgtaggtcactttagctacatatacctttatgtcaatcaaattatgtgtgctttcttggtgtaattaattggattcatgtttcagttgtaccaagctggttgcttgcacccttagcttcatagatctaggaaagtttaaactacagtataggtacatacgcaacaattgatctagctttcatattttgtctctcttggcataacatttggcaaccttttctgtcttgcatctgtaactacctagctggagatgcaggatatgcatttatttaaccttgtggtcacaacacacaactcctcacatcactaaattacacacttagggacacctttatgcagggaaaacatgctgtgacacctcaaaagcttcaggaaaaaaaaacccaatcttttcattcatgtgatgactcaattaggttagtcttgcattgcttgttgttggctggtgaatgtgatctgtagttcctgaagatctgtaacatatccctttaaaatatatctgaacttgcgagtaggagaaggacaccgtgtttgcaaacggcagggcaaatctaaggaccactccttttaatttctgatgatgaaaattatgcatctcaacattgatcagcactttttttttggggggaaaaagtgatttgctttttgtgcatgtgacgctagtcaagaagcgtgcggattgaacagctatttgtgcgtgtaagtcccagaaaatgtcacattattctcttttaatataagaaaattgcatgcatgggatgattaacagcagacaggcctttgaaacatttcccctccatgtatttgatttttcatttgcagtgtacatgagtggaactttagttacatcgcggttccaacgttattttcagaattatgcattcagttgatacattgggaaaaagaaagagggtaaaaaaggaaacatgaagcttcaggcactccgtgaaacggcaactcaaactacctattagactatttcagttgtatttttatcacatcgcagcatacatcggttgctcaggaagctcggcaagccattcctccttgagtttcccttgagtaaatctcctcagcatttccagggaagctttgggttggtccattggaaccatgtgaccagcattgtggacctgcattagcatagaagcaacgatttattgtcgattatttagtaaggtttcttgatccataggtgcacgaggattctaatataattccttgtaaacattagataagcagaattaaccaggttgagtggtcctttcatgccagaatatggttatggttagtctatattagaccatctggtcacattcttctggcaagtacactaatatttgtttcttagtggtaacaacactgccataaaccagatgtttcgtactttcgtgatgaccacaaattttccatccacgccataaaaatatatagcgcattctaagtttgcaccaaattagtttttttttaaaaaaaatatggagaataaatcataagaaaattaattaggtaaaagtgtttgataaaaaccttgaggaagctgagtggcccgtggctcttcaaaacaccagcttcggcaccatctactacaaatggcgattcatgagatgatacaaagtctttctggccagaccattccatcgagtggacccacctcgagtttcctacatacatagaaaaggttacacttgatacaataactgcacaatcattaaagattttggcaatggacatgcaagacaatgtcacaaatctatcaaatagaagtgctataaagtttgagatgttagatcaattaggattttataaagctccctcttatatattgtcccaaggtgatccagtagtagcaaaccaacccaaaacaagtcaacaacaaaacttgtctggagtagcagtaatctaactggtagcaaacagcacagtaaaatgcataccaaacgtgctaactatagttatggaaatctagatgccataccaaacgtgctaactatagtaatggaaacacaaacaagaacagattggcatgtagcctgcctctgttactagtacccatttaaacgtcgattgatttaactgtggaatttactacactccagtggtaccagctctacagctatgcaactgtaatttactgttagtaatggtcatgcacctgtaactaaagagtaattttacagtccttgagaggtacgtttttagtggaaattttgataccttctagtaccaaaggtatcgagaaataccaaattttacaatagaaaatatggtacctccctgtacctccttaaggattgtaaaatcactcttaactaaactatagcatcagcagaaatttaacgttttgtatcctattaacaaattgcagggctatgcgttattattttccatgcaaggcattgcagtagttacaattgtcggtggaacaaaaggtgcaaaactgacttgaaaaagcattaaccaaatgtatccttaccaagccaattgcatataagatcatactctccagcatatataagcacattgatcccatcctcaagtagagctgggatgccaacttccaagtttctcatccagtctgtcagcattgcttgataaacagtagtgctgcatgagacaaattcaaggtcgccaactccaattgcttctttgactgctttatctccaaaaaacttctccaagtttgagaaatcatagcaaagtttcccttcgcattccttcctaacgtcatagtactgtaaagaagaattaatatgtaacggttttcagccttagtgaaccaatgttatgcagtcagttaagcaagtgaccattgcttacattctttgtcccaacaagcttcatgatggagctgaaaatagaattgcagaccatgtatgctgccatgcaagatgctttcccattggtacctgaaaaatcagtaggtgtgagtaacagttctcattatttgaagaaaccttagggtgttattacaaatgcactatctcatagctgaaatatagagaactgtaatgaaccccatttataccctaaatggtttttcaaccttttctgccagcattaatcattcaggaagttcaatgcagttagatatatgtggtttgctcaaaggtagaatatggtactgaccacaaagctttattgcaaattcacatggtgggatgaacttgttgatcctgtcgtaatctgattttttaataaggttcatgtccaatgcataatcggtgtaagctttgtactggattgctggatccgtgaggccattaccgatcgcaaaaccctacaagaaaaataggtaaaactgtgtaaaatagcaaagaagcaattaagttaaaagatatggcaaacttgggtaaggatcataccttcaagtttatgtgaatgccctcgtttgctttgtttccttggtgaacccggcttgcgaatgctggaatgtagtgcccagcataagattctccggttataaagaagtcattctttgcaaactctggatgcttcttaaagaacacctgacatgggaatcaagcaaatactacatattactctacatttttgctgaagtcaacaacacaaaataatcaactctcagatcaatacacaactctttagagagatccgtgcatattatctggtttggtgctaaatcttcggaagttatctactaccgctaatttaatgaagctatccagtcaaatatgttaggtacatcctttcatgtaagcaatgccaaattccaacctggaaatttcctatggtattgtagcaattaattttacaggagcatcatatcaggtaagagaaccactccacaaattgaggatgaaagcaataattaggcacaccagactgttgactgttagttacttagtcaagtagagtatgcaaataattattttgtgaaatggaactattattaagagcagagcctgcagttttaaaacaaacatattgctatgattactttacattggagatcatttatgtttctttattagtatttagtattgtaaaggaatggattgaacaagcctatatagtgtaatcagatatcacatggaattgatgaaacaaagagaaaaaggcaagcacgtcagttacaagggttgagagtagtacctgaagaaagctatataggtcattgctgacgcctgtctcatcatgacgagtatcacgatcatcagagctatagctaaatccagttccagtgggttgatcaacaaaaattatatttgaaatctgcatgaagaaagttttatcagaaggggtggatacaaaggaaccaaaaggtgtgtaggcttgatcattgtaagatgtgaactgactgcagcaatgaccactgccattgttaaactcatcatgaaactagttggaaaggtctaaaaaatcatagtaggaattaatgttcaccaataacgaacaatactatgtagggaaacattgtcctcaataaactcgtaaacttctgctgtcgtgcatcagttcatgtaaaaagcaataaaacttaacaaagactattgtggtggcataagagatgatagtcaaatggaacacatatggtaagttggtaacaacctaacagatagcaacaatgaagttctagccccagatggttttcttcaactaataagacactaaaaggcaaagtgaggaacacaatatagtaagttggtaacagttatccaaatttggtaacggaggatagcaaggatgatattctagacaataattttttcccccttcaacagttactgacttcaaccgggagaaactctgaaacggacattattttcactattgcttgcttaaccaagctagtcattcagtcaacaatggtcaaaatagttttttcatgttgctctcaccacaagattgcttgcaagcgatgatgcaacattaacaagttaatattatgaccaagtctgagtcgttaccatactaaggaaactaaacatatgatgcaatcaataacgtattatcgaatcgatggatcgttaccgtgtcccagccgaatttgttccaagcaagcgacatgttgttcgagatggtgaacgggccattctcgtagaagacggccagctcgctgctgcatccggggcctccggtgagccagatcacgacgggatcctccttcttccccctcgattcgaacaagaagtagaacatcctgcaagcaacgccccaatccatccaacaaacaaacactcaacccaaaatttccaaaagaaaaaaaaaagagagagcaagaactttgtactactttacaactaatttggggttcgaaattcgaaatctacctcgcgtcgtgcgtgttggggaggcggtagtagccggcgtggtggccgaggtcgccgaccccctgggggagcccgggcagcgtgacccgccgctcaagcagctcgccgggcgccacgctggggacatccccggcgccggttggcccggcctccttgggcagcaggttgagcgagcggatgagccgctcggcctgcgccgcggggaacttggcgtcgcggggcagccggagcccctccgcgcaggcggaggcggcgaggacgacgacgaggaggatgagggagacgcgcgcggtcgccattggaggagtttggagattcggagaggttttccctccgaatttatagcgttcgcggttttggtgtttgaaacggactggtttattagttttagtttttttttttaaacgaactttgcttccaatgcaatccaagcacagccggattccttttcttttttttttctgtttttggtttctttttgccttttcgagctcgaatacgaatttgtcctcgtgtggaatctgagctgattccgcttaaattcgtattgtactactacttacggttctatttctctgctcgagtggaaatcggaacagaattagtaacagaattcagcttgaccaactgaatttgcggctcagttttgatggcattgcatgggcaaacatttgcccaagtcgaaaaatacaaagaagatcagtttggtctgttggctggtgacatcttgagatttaattcaaaggaacttttctgacatctggtaccgactgaattaacttaaaaagaggtttgtgcaggctagtacgaaaacaaagagtgctgacatatcagtcgcagtagtttcagatccgtaaaatgtggctgaatccacatctgcatgactgaatttcggttccctgacatttaatctcacaaattgtagaagatgtgtgttttcggcatggtttggggttgcttgaaaggctggagaatgtgatgccccaccttaacatggagctgtccttatctcggcaactcgatcagttaataatagtttcactttcaaaaatcacatggttcagatgccactaattaagaagtgaacatgctgctgtgctagagaagctaggctgtgtttagttccttctaaagttagaaatttgggttgaaattagtacgatgtgactgaaaagttatgtgtgtatgacaggttgatgtgatggaaaaagttgaaagtttggatctaaacacaaccctagtagtatcataaaacttttcgcagcattagcatcaggccacaatgcttgacagttgacagtatcaggaattcaggaattcgttcatgtaaaaagtacatcacatcaattgtttcagaaggcatgcagttgacatgatggagaggctgtttatctgctaatgtaatcgacagtaacacgcatgcagtatctgcactaattgttactacacaggagtaagattgcaacacgcattgctgattacgactgaatctgtcagaatcagtcctaagattttgggagcacattgctcagggatcattgcagcaataattatatcgacgacgagttccttgcacgcagcagcctcacgagccttgacgcatcatcgatcagtattagtagtagtgtcagtattggtttgggtcgcaagaattgcagagaggcttgcaagttgcaggttgctttgcagctcgtcgttgcttcgcttttgctactagcatactacagcaggagtactaattaacgaacaaattaatagacagttagctggagatatggcctgaagattaaggtgttaggtatcgccgaaaaaatgtagatcagcaagctgcctctgcctgcttaatttgagatcagcagcattccagcctacgactcgtcaacgccagttcgtgattgctcgttgcgtacttgcgtcacgtaatcaccaattgtgttaaagatttcattttctttgagaggatattgtgttatgaaatttttggatgtttatttgtggggttgcaataccggcgttagcttgtgagtactgaagaattctgtctgtccaaatatcatccgcagcgaccaatcaggcccatctaatatggacgcacagacgccgcaatccttttccaggccatattttccaaggaaaaagtctactttaggtctctcaattatggtgagttacatttacaccgctcaaccataaaaccaggtaaaatccctcaactatcaaaaccagtacaaatcaagtttctcggctgtttgaacggtgatttcatcctatgtggcatctacatggcacgttgacctagttttcgtttggcgtggcacttacttgtaattacagtcacaaaaagaaaatataatgggatccatatcagttctcatagtaatatgagagttttcaataggtctgcataaaatacattttttggggtacgggtaaaaatataaactagtggcatgtatcaaactattatgaaaattgtaatagcaaaatatcatttttcaaaaaccatcaaattgacctttttttaattatttttctgatttgcttgtcctctaatgggagatccattgcacaagctaaatattttgttttcccttttcccttgcatgctgagttttggtggcctttgggctgccagttttttttttctcatatatcgattatctgcttcagctgagaacttaattagaatatgttgttgttgaagcagtgcaaagaaatgagagtgtttgttacttggaatcctccagatgttactgttgtcatggccccttttttttggaatgctagataccggaattccgtccggacgggatcctttttgtctccttgcttattcaaagaggagcgatacctgaccatgcacgtcctgagcagcagcagcctctacaggagccgctccagtgcgcacgcatggttgacatgggcagtagtgttgcggcgcccacgcccgccctgtcgacacactgccccgcgaccgcgagctcctcgccggtggatgaggaagtagatcgcgaaggtgctgccctcgctgccgccgtcggtgcggagcacgacgagcacatacttggctaggcagaggacgcggccaccagcgacaagctccgacgtggcatggacgatggaggatacagccatcgccgacgagctccgtcgtgggacgtggatgacgaaggacgcggccgccggcgacgagctccaatgtggcgtggacggtggaggatgcggtcgtcagcgacaagctccggcgtggggcgtggagatggaggacgcggccgccggcgatgagttccgacgtggcgcggacgatgaaggatgtggccgccggcgacgagctccggcgtgggacgtggacggtgggaccaccggcgacgacgctttgatgctcggctcctgatatctagtaggtaacgtctgatacctcacaagtatcaccttttacgtggtaagaatcgcatgatacctgataggtatcacccgataccggttaggtatcaggacctgataccttaaaagtatcatcctctaagtggtaagaatcgcatcataccttatagataccatctgatacttcacaagtatcacctgatacgtggtagaatcgcatgatacctgataggtatctcctgatactggttaggtatcagaacctgatatctcacaagtatcaccctctacgtgataagaatcgtatgatacctgatagatatcatctaatacctcgcaagtattacctgatacgtggtagaaacgcataatacaggttaagtatcaaaacctgataactaaccggtatcatcccattcgaaaacgggattccgttgtatgacagccgcttttttttctcttttctttttctcaaatgacattagatttatataccaacttaggggcgccaagtggcctaatcagctggtaggtggcctgccatctttagaaagatggatggactaatcaattggccttgggcttgtcggcggcggcggcgacccggccgtcgttgccggcgagcttcatgtacttgtccttcctggtgagcgtggtgcattggaaccctagctccttggcgatcaccctctgcacgtggttcgccacctccaccgcgctcctcccgccggcgacgcacgtctcctccggcctcagcgccggcaggaacgtcacctcgtaccccggccgcgggttcatgtagaagaagtaagggtccaggaacttccaccccctcgccgtcgacccatagtacgtcccctgcctcgcctccaccgccaccggcacgatcctcgccgtcagctccgcgaacagcgccgagaaccgcagcaggtacggctcccggcacgtcgtcccctccgggcacaccaccacgtccccctcctccagcagcgccgcgatgcgcgccgcgtccgccgcgcggtcccgcgtcagcgccgccgcgcggatcggcgagatcgccgtcgacagccggctaacgctgtacgtcacgcacgtcacggggcggcccagcgcgatggacacgatgatggggtccagcgcggtgcggtggttgcacaccaggagggagcccggcgtccccgggcgcggcggcggcggcggcgccccgcgcacggcgaggcggatgccggtgaggcggtaggtgtggcggacgaggcgcgccgggacggggaggttgaggaacacgcggaggagcgccacggcgaagcccacggggaggtaggccagcgcgaacagcgcgctcgctggctccgggcggcggacgaggcggccgtcgtggaagatggcgcgcgacagcagctcgtcggcggcggcgcgcggcgcgcgcttgttcttgggcaccatgtaggcttcctgcgcattggcaatttggcgccaaaacagagttagcacactaaggctgtgtttagtttcacatcaaaattgaaagttcggagaaattggaacggtgtaacagaaaagttggaagtttgtgtatgtagaaaaattcgatgtgacagaaaagttaaaagtttaaagaaaaaagttaaatctaaacaaggcctaatttttacaaatatctggctttggagtatattcatatgtacattttgaacacttgtcttctttttttttcgttaaataaaaacaaatattgatgatgggctaggttgcattctgaatgtaagcatgaaattttagtttatgatagtctaaccaattaaaaattgctagtggtcaaagttgaaacagtagagtcaatattcagagtaaatgcaaatggagagagtactaaatccacattaattgatgcaaagaaaacaatactatatgagtaaagtgatcaatgataatgatattactataacaagtcagcatgagcaaacaatatttgaatataggagtacatactaatttggggttttggttttaaaaaggacgaaataaataggaagcaactgctaactgcctactaaaggaggtgatggtaccaacagtattgagttttggccacaagttttgcataaccataatgtaaattctagagccttcttgatctttcctatgaaaagaggggaaaaaaaggcaattcaacaaaaaaaaaaggcaaaaagctaagaagcgtacatattcttgctactcgtgctaccacaaatgagccaatcggatcgaagccatgaacactcgaagaacaatcgagcgtgcaattcctaccacaattaatttcacaatattttctttttttatttttggcgttctaaatgaattgttaaattattagtggccacatgatgcaaaacttcaattttgttcatgtgtgattgattcaattcaagaaatgatgaaaatttcgagctttggatcgtaggccatgaagtgtaccttgcagatggccatgaagtcgtggtcgctctcgcggtcgccgaggccgacgtcgggcatgtcgccgccggcgaagagcctctcgacgacctcgcgcttcttctcgccgacgaggacggccttgatgcggccggtgaaccgcttgccggaggcgaacgtctcgagctcggtgccggccacctcggcgccgaggaactcgcgcacgaactcccccaccatgacggccggcgacgcggtgaccacgacgcggcgctcggcgcagccgtggaacaccgcccacgtgtcggcgcgcaccccggcggcgtagtggcgcggcagcacggcgcgcgccacggcctcgacgtcgcggacgcgcagcccggcgaacgtgatgaacacgagcagggcgatggcggcggcctcggagacgccgacgtagagcgcgaggagccacggcgcggcgagcagcagcgccagcgcgcggaggtagctgccggcctcgagagccacaaggaagtagtacgggaacgccgacgacgacaccagcagcgtcccgtcgaggtccgccgccaccgtccgcctcgcgcccgccgccgcgtcgtacgccgtcaccggcggaaagaacctcctcctccccgccgccgccgccgccgccatgtcgctcgcagtcgccggcgaggccgagctcttcacgcttctagtagggcgatggagaagggttggtctgtttgttgagctgcttcgtctgcaccaccgcggccatcgatggcgacgtcgagcttctcctctgtttataccccttctgcaaaaaaagccatcgaatccgactcggattacgagcttgtcaattacgcgatccgaattggacttgggttaaactaaagttgccgccacaagactgattaatcacgcacatttcagacctcacaagactccgatttaattggttaaaaactttcagccactgttacatttgatcactactccatccgtttcacgatataagtcattctagcatttctcacattaatattaatgtgagaaatgctagaatgacttatattgtaaaaaaaggaaaaggaagtactaattttctccaagaaaagattcgagaagttgtatttatactggcggtatgggaacgcaggtaacgcgtgacaggcggcgcgaaacatgagaaaaaattgcatcgagttgtaatcaaatttgggtcaagaatggcacgcatgaagataaatggtggattggattattcatgaggttttggtgctggatcgttgttcgtttggatttggtcaagacgtacgggcgttcgtcgcaacgttttcggagtgtcggggcaattagtgagagcaaatgaaatgaattactagttctttttgtttgagagagaagcaaatgaattagtttgatgtgtgtagctatccgtccccgatataaacgtgagacgtgagtgaacgagtgatcaaatggaacaagcatccacgacgagaagactagtagtactactaatgtgtgcatctatgtggatgacaagggtttcctaaaccggcgccgcgcggtaacagtaaaaaaccgtacaaaatttattaaaaatttaaattattttttaaatttatttaaatttaaggaggttaccgtggtattgtattaccgtacctcgcggtaaggccggtaaccacggtaaccacacggttaccggcggtaaggtaaaccctacatcgacacacatggaggcatacggctacagtttaacagctacttaggcaggaatgtacgtatgtgcgttgaagagtttggcatgtttggacttttggacgttggacagaagaactgaaagaaaatttaaacaaaaaaaaaataagagaagaaacagaagttgctgtgcagttaattagcgtgaagattactagcacgggtggttgatgcggatggccaaaccattaccttttaccaatgctgctgtgagcatgtgaattactccctcattctttaaatgtttaacgctgttgacttttttaaatatgtttgaccgtttgtcttattcaaaaacttttgtgaaatgtgtaaaactatatgtatacataacaataaatcaaatgattggaaaaaaaattaatagttacttaattttttttaataagacaagcagtcaaacattttaaaaaaagttaacggcgtcgtacattttgggatggaggaagtatatatttcctccctatgtcactgtcaatgcaaatgggtaggcaaccataattacccaacccagtcttttgttggtccacggcagattggcagtggcaccatattcctacctctatatttcttctgcgtggacctggaaaaagacagcattcgtattgtattttagttgacagtttttaaccaaaacaacaacatcagagtggcgcagcggaagcgtggtgggcccataacccacaggtcccaggatcgaaacctggctctgataattattttttattttattttaaaaaacatcaatttcatcacttaaatggctaatttttaaaatttcaatcccgctatcattttcttattcaatttcatcacttaaatggctaagttttaaaattttcatcccactatcattttcttatttttttaaaaaatcaatgtttcgtcacaggctaatttataaaatttcaatcacaaatcttatatggctcaaagataagtcagaacttagctacttcaattttatctgtaaactaaagggccgtgtttagttgttttagcaaaataattttgagcgtatgaacacacatttgaagcctaattaatccatcattagcaaatatttactataacaccatattatcaaatcataacgtaattaggcttaaaagattcatctcgcaatttacatgcaaattatgcaattgtttttttttcgtccatatttaatgctccacgtatgtctaaacatttgatgtgatgaaaaagttagaagtttaaatagaactaaacacagcctaactcattcaggaaaaattcagaacatatcagcaatagaatgcctagatacaccatcagcatgcaagaaaaatgaacaatcacacataacaatcacaggacgcatcacactcgtgaattatgaacaagttattatctcaatatgtataggtgtgaaataaacaactgaacctcagacttcgtttgttacagcaaacgggcacaagtcggagatacagcaaaaatactacaaacaattaaacaccaattagcaacgggcactctctcgagtaaacaatgcctggaggattgccttatttcatatgtgcatcaatcaacccatgtcaccttcacatgtgtgacattttctccggacaatatacagttaagctgatgccttcagatgctgataacccggcatctctcaggtgggaagtcatgctccaccaatgggcctgtggaagaggacaccaagaatccatctgccctgacagtatccaggtcaattgtcactatactcagccctcttccaataatgtaaatctttctcccaatgcctacgagctcacaaggaggccttgtaagcttgtcagacagcctaccaagcatgatccactccttcgtctccttctgccacatcatcagctttgtgccgagcgactgctccagcatgtagagcgttccgtccatgacgactgttgatccagaccaacatagggcaatttcattctcagtgcccctccaagtgcggcacaatggatcatatatacctgcaaagtacattctgttccaggcagccttgtgaacagttaccaactccccatccaatgccacgaattttacaatgtcaggggtgagcattggattcttgtgcacacaccaagagtttgtgactggatcatagatgtcccatgaatttggcgacttgtctgtcaaacctagtccaccagtaatgtatagtttcttgtccagagctgcagaaacaaaatagcacctgaaaacaattgaggcaagtcaaaatgcgtgcagatgtcataaaacagcttcacgtgaaaaaaaatgttaatggccagtaagtaaactttgtcatcatatttacctagcagtaggcattggagctacactgctccagcaatttgatgaggcatcataacaaaatacttcatcattagcatcttttagccagctacaaccacccaaaagaaataatctcttgtctaaggtctcaatggaaatgccttccctagacgagcatgggggttcgatgacttgcataattttcaaggagcgggttgtaggatcaggagcaagtacatagcatttgatgcccgtactcctacaaatcacatatacccaaggctcatccaaattgttcctcttgcggcaagagtgccactcttcactggaaagcagtgccctccatctctttgagacacacctgagagcattatgatatcgccgtggaactctcgctaagcaaagaatagcaatctcatcaggaagaccatgtataagtgaagtatgggggccatcagaatccatgccgctacaggatagctttccaccgtgctttatttcagaagtcatcaattgtcctaaagagaatgagaacagatgagaaagtggcgatagacttaattaaatatatgctctgttgatacaggagataaacagtgtgaccagaaatttctaacaaaaacagaaggaaaaaaagagaacatcagaataaggaaaatgttactttcatgcttgccccgaatatttcagttctggatgtaatcaacaaaggagtggttaagagcaacctcactcagataccatccttataggagtcattagagcaaactaacaaggctaacaggctaaatacgcatatccattcaaggttgtgctcataaagggtgaaactatacaaggaacaggaacacagtgaatgcaacgaagcatatattattttttcaagttgggaaaaacagtccaaacattgacatgattttgcaccaggagcatgactagcatgctacttgctattctattcacatgtttgctcagaatctctgatcagttttggatgtaatcacgtgaggaccaccttttcaagtggttccttactaagataccgtccatgtaggaatcatcacagcaaacaagcaagaaaagaaaaggcaaagcaaaaatctcaattggtttattattatcccttttttttatattagccacaatatgtgtcatggttaaaaagggtgaaactatatgagcaacaaaaacatgatggaaaaactaaatttctgaaaacttttatctgttaactttaggagtaggcgtgtttaaatagggtgacaccatataaggaacagaaacagtcttttgagttaggaaaaacagtaaaaaaaatgacagtatcttgctgtttgcaccaggagcacaacaaggatgttacatgctattcaattcagatctacacacgtttgctcagaatctttgatcagttttggatgtaatcatgtgaggaacactctttcaagtagttcctcactcagataccgtccatgtaggaatcatcacagcaaacaagcaagaaaactcagtcatcacagcaaacaagcaagaaaagggaaaaaatgaacatctcaatgggctgatctattatatcaaaagtagtgatgctttaaaaggggcgacactatataaagggcagaatattgaacctagtgaaagcatcaagcatatatttttccatccagttgggagaacagttcaaatttacacatgttttctctgagtctctgatcagtattggatataatcatgtgaggaacacttttaagtggttccttactcagatcgtccttaccaaagaggtcatgcctgcgtgacactctacataatgagcttacacagtgaagccaatgaaggcatgttattcttttcagctgggaaagcagttcaatcacaggaaggattttgctcaacaggcacagcgacttcattatttattatttaattcagaattgcatgtttgctcagaatctctgatcagttttggatataatcatgtgaggagctctctttcaagaggttcctcactcagataccgtccttgtaggaatcatcatggcaaacaatcaagaaaagaaatgttaatgggcctaactgttaacttcaaagggaaattatgtttaagtgtaaaaagagcagaaaccaagcagatacattaagcgcgtatcattgacaggtttgcataacagtcaaatgtacgacaggattgatactctggttctattcagattcacatgtttgctcagaatctctgatcagttttggatgtaatcacgcaaggagtactctttcaagagccaccttactcagataccgtccttgtagatgtcatcacagcaaacaatcatcataaaaaaaaaatagggggtgtagcatgactgtaaccaagcctacatagaacaggaacagcaaaatattccttctttcacagagtgaaaaatatgcagagttttgctcagacatttttagtctcagtttaggtataatcacgtgaggatagatccatcgctcagataccgtccttgtagatgtcatcacagcaattatgagatacagtcattaagttgagcaggcccacaaacttaaaaaccacctcattccaatctaaccatgtaactcagcgacatcaactcaatcaaaatgtactaccttataatacgtagtaccttaacatgtttctcaggttgagaaacagtcaaatgtacaacaggatagacaatttcttctgttcagacacatgtttgctcagaatctctgatcagttttggatgtaatcacataaggagtactctttcaagaaccttactcagataccgtccttgtaggaatcatcaaggcaaacaatcattctaaatccagtgcaaaacaatcattctaaatccagtgcaaatcatcattctcatttcaaggcagtaacaaagacgacacagaacacgaatagcatatgctggttgctgcttagttctgaacagcgagaagcaaatattccaacttccagatggtaaaaaagaaatgcagagttttgctcagacatttttagtctcagtttaggtataatcacgcgaggatagatccgtcgctcagataccgtcctattagatgtcatcacagcaatttaatttgagatacaatcagttcagcaggcagattaacttgcacgcctcattccaatttaatctaatcatctagctcagctagctcagcgatatcaactcaaacaaatcctaccacctgaacatacactaccacacaagagcaaccttaacaacaagatgataagagaatgagaacgatacaataccatcggggggaaaaatcacacctcggaaaggtgcttaagcgtcggatctgacgaggagcagaggcgggcgggggtggacgcggtggatttgagagcggtgggcggagttgtggtggaaaggaaggagaagggcatggagcaccgtgaaacaacaaacaaatcctagatctggtggggatcagagggtggcggcggcggcgggactagggtttcggccattgccgcagcccggaggaggaaaaaggcgagatgcggagaaggggaaatgcggatggtgacgccgccattttatcgcggcgagatgatatgatggccattatgcaataagacccctctattttttctaaaatacgcgccgttttttccgcaactataagagggaaaaggagaaggatagcaacagtagatggtttcaacatttaaatctaccaaaatcaactaggaaaatgtagcagatttatgaaggccccatgtgagaatctcatccactcaaatcacagcaaatcaaccaaatagaggagaaaaaactgggacagggaagaggatgcccaaccttgcaatgggcgacggacaactatccattgtgctcagctcgacggagagtgacggtggagcagggggcacgaccggcaaaagagagggaggacgaccgaggagagccggagtcggaggagaggggaggggcctcgccgccgccagagccgctagggtaaaccctagttttttcgcgagagggagaagtagcggtgaccccatatatcctccgtgagcgggtgcatcactcgagtcgagccaggccgagcagcgaagtccgtttccgtcgggccttgggcctggctgaggggctattttttgcatcctcgtggacaggctgggaggcccggcccgagcaggcaaccaaagaataagttcattttgggtccctctatttgtaggtcagtctgattttcgtcccttggtcgcaaacaaatttgcatggactggtgcgggccaaccaaccaaacagcctcaaagtgaacccaaaaaccctagcgccgccgccgccgccatggaagaagcgtggccgcctctcgcccccgccccggaagctgcggctcctcccggaggaggaggaggtggaggagcatggggcgcggcggcggtggcgcagcggaaggaggtggccgaggagtcgtcggcgcatgcggtgagccggctggtggcgagctgcgccaacacgagcggcgtggcggtggccgtggtggacgccaacgccgtcatatcgggcggagccgcgctctcctcgtccgccgcccgcctcgtcacggtgcccgaggtgctggaggaggtgcgcgacgcgtccgcgcgccgccgcctcgcgctcctcatggcccctgtcgagaccctcgaccctgcccctgaattcgtcaagaaaggtaggtactaccttcagcaattctgactgaaccttgttgagtattagcaataaaactatctacagatcagtgaatttcacattttccttaaaatagattttatggtacgagtgtactaagaactggataacggtgtaggtgtagccaagaccatggtttaataagttttgtggttaaaacattgcctttgtgtaacatgagctggtagtttgtttaatgttgttgtcttaaaacttaatgtaagcatgagggaaatggcaaggcttgcatgtgcaaaagcaattagatgtcacaacagtatggttttctatagaatagaattagccttctagtcttctactatggaaattttcctcatctttgaatgacgtaatgatgagaaaggctaatttctcaatctttgtttctggcagttgtcaaatttgcccgggaaacaggagacctccagacgctttcagatgttgatatcaagattattgctctagcttacatgctggaagctgagatccatgggactaaccatttgcgggagcagccacctcctctgcgtgtggtgaatgtgagaaacctgaaagaggctccactgccaggttggggctctaatgtgcagaacctagcagaatgggaagaattggaccagatgtctgaagcaggtggggatctcaagtcacgcatacttccactgaaggatcttgagaaccacgaaataccgaatagtgagaccaacagtatttctgacaagcaaggtgatgaagagcatcagcctgcaaagaaagatgtaggtattgcttgggaagatgatgagaataatgaaggttggttgcctgctgttagtcgcagtacacacagaagatatctacgaaggaaggcgagacgtgatgccctcaaggaatctgaacaaagtattgagacaagttctgctgccccatcaattgatgacgataaaattttatctgaaaatggtttgaatccagtggatggcccttccgctgatactgatgttatggagcaccaagaagtgaatgaacctgaaattgttgcagatcattcgcaatctgataataaggacaatggggtaggcaatgttggtgatgttgaggagaccggcggtacggacgcatgcattgaagagttggataatttggatatcaaaagcgactctgaggaaggtgtcgattcatctcttgcagatgatgggagcagtgagcagagttgggcgttgaggtccttatctgaatctactgtagcatgcataaccagtgactatgccatgcaaaatgtcatcctgcagattggtctccgtctcttggcaccaggtggcatgcaaatacgtcagttgcacaggtatgagcttttagcatcttcagagctctttcacgcactagttcttgttctatttatagtagtttctttgtaacgctaatgctttgggatgctaatttggcaggtgggttctgaggtgtcatgcttgctataaggtgacccaagagattgggaaaatattttgcccaaaatgtggcaacggtggcaccttacggaaggtttcggtaacagttggtgaaaatgggatcactatggcctcacgacgtccgcgtgtgacacttcgaggcacaaaagtgagtgtagtttcaaacttaatgctgtttttcttccatgtggcctagatacttttatgttttgtcacttgcctgattattgtggcaatattggtttgtttgctgccttgctttactgttatctgagaaatagaaaagcacattttagactcatgccaaatgtccagatagtttatttccatgcttgtaatatgtatgatggtcagaggttcaaaagtgtcgaacatagtcttcagtgtagtggtgtagaaaatccatgagctttggccagtcccgtatgcattccttactaatcaagtccttctagactctctttggtgaatcgcaatacatatcctgccatactatggccttctacatcagttttcgtattcatttcttagtctgaatgcttttggttggatatttttccatgtgcccacctggcctttccaagttgattcctactgtgatgacaaaagattttctttttaattgtatgcctattttctttcagttttccctcccaatgccccaaggtggaagagatgccataactaagaatcccattttgcgtgaagaccagcttccccagaaggttctgcaccctaaatcgaagaagtcaaacaagcaggtaactagcccttgctattgttagatttactgaaaagcctccttttataaggatgcctgcttttcggcacttaaattcaacatctccaaaacgttcttttacaccaactatgtgctctgctaaacagatattctccattctgtgggtgcatatgcttttttttcctgtttttgtatcgcaatagttaagcaactatttatttaaccattaataatattctctataggacgatgatttcttgggtgtcgaggacatattttcgcacagcggtgaaaagaaagtaccactgaaacctccagtgaggaaggcccttgcaatgttcagtgggaaacggaatccgaatgacaaccacttttctcgcaagaagcattgaatttctgttccccatttgttgctcttttactatcatggttttgtactgcattgtttgacgagagaagtagagtgtatcaccttgatggtgattgtggagaaaaaagtcatcctgtagactgaactctgatgaagcatgtaagctatacaattttgcagaacatctatgtaaggctcagttccatagtaccattttcatatcaattacagctggagtattttgagtgcatgaattgcgaatacatccagaggtttaacgttttttcgaacatcaattattagtgacaagtaatcactctattcctcaaaattattcaaatgagcaactggagaattcatcaaacttactcgatccaacaataaaactttttctttcagttgggtattgtgctactactacttgagaattacaggctcacatttacacagacaaatggttacactttttttattgcagaaacaaccaaagaatatgtccagcctagggtgtgcttaacttctactacatcacattttttcttacaaaagagaagaatcaaattaatgaagcagtataccgcaatttctttcgatgcttttacgctcaatgcacacaaaacacacgaactcgatcgatcatatcacacacaatcgtcatcagaagagcagatcgtcactagtggcagcaaatccgccatagatgtctcccatgtttagcaggtcaaagtagccgccgcctcctgccattggagcagcagcagctgagctctgatgctgctgctgcaatgcgccgtagctgccgctcatctggtccccgaacgcgccgccgtgcgacggcgtcacgttgccggagctcgccgtggacgccggccagtgctgcgccgagatggagtagctctcctgccccgccgccgccgcagacatcggcatccagtcgccggtgaagacgaagctcttgggctgctgatcaaatggctcagcgacaggtgcaggagcagagatgccgccatggctgccgccgctgctcaggttggcgtcttggtcatgggaggtggtcgtgctgccgctgctgttcttgatctgatgatggtgagggtgatgatgatggtgatgcaatgatggtggctcggtggtgctcatggaggtgacctcagctgctgctgctgctagattgttagggatggagccctgtgcctgcatcaccctcttcttgaggtaggaattccagtagttcttcacctcgttgtccgtcctcccaggcagatgcatcgcaatctgtgaccacctgatcataaatttctcaaaacaatcagcatcatgtagatgaaatggaacaattgaaaatgctcaattttgttattctgtgacagcttgagctttgttttttttaacttaaaagacgttgttttgtctgaatttcaaggtaaagttcagctacaagttagaactagcttggttttgtatcatcctgttcatagagattgtcaggtgtgaggattacttgttgcccagcttggcctgaagattgatgacaatgtcctcctcctcctgagagaacattccacgcttcaatcctggccgaaggtagttgatccaacgcagccggcagctcttgccatttctctgcaaaccttttggaaataaaaaggagagaaaaaagggtcagaaataatagcagtgaatgagacaaagatttcatttttatttaagaacaagtgaacaactgatgaactttagagagctagactctatgtactgtaatgcttttgttattattttggaaaaaaaagggtgagaattcttccttggctggaatttcaactggcctaagaattgtgatcaagctaagcttgaactaacccaaagctaagtactctctgtaactgctaattaccaattagagaggggactagactaggctagaattcacaattgtgaagagggatgcattggtgaatgcagcaatgtgcattcacagtagagacagagagaagcaaaaagctcaccagcctttgcagggacagcactccagcagccaaggccatgcttgacaatgtagtccctcagcctctggtcctcctcaggagaccacagccccttcctgtagttcatcttcggcttgtcgcaggaccggcaccccattgctctcttctttccttctctgaatatctcctcctgttcttcctcctgcaacctgtatgttggtcttgtctcaatatgagctgttgcagtagcagagttgtgccagtcctttcagcaccatgtgaccccttgtcatttaaagggggttctcacattttggtgttaattagtttaattggtgggaatgagtaggtaatacatgcacatgcatgaggatcatcaagagggaggcgttggtcagaggatatcacattgtcacctctttctcttcattacacaaaaaaagattctgatagttattctttcagttttggccttgttctaatgatgtggatgcttgctggcactaatgaccacattttatttttgtttttaagtcggtgactatattgttattgtaattggcagctgatagtatatatgttaattacctacttacttagaccatcggtttagtaccaaaattgttagttatcagagttttactgacaaagtaattcgtttcagaggcagtattttcagatgaccctgtaaaactattagggccatgcattagtagtagagtgataatggccatccaatttgtttactataaaacatgattatccagtaatcagcgtgataaaggtcagactgtctccaccaatgatgagtagagcattgacatgagctgttattgcgatgaaacaaacaggctcttggattagcaatgacaagacatgatttaatcaccctctcttaatgccaattgccaatcattgaaagcatctgcctagacaaaacaccaaggaggatgaagaattgcccaaggacacaagaaaagacaggctagttagcatccatccagaaggatttgcatctgcaaggatcaacaagatgaactgcaccatggacaagggccatacataaacaaggaccccagaagcacaaattaacaatgatgttgagcttgaatgccaaaccacaatgctcctttcttatgaaattttaagaacaacatagctggcagaagaaattcagagtgaaagaatcacaatcattttacacggcttcatgtgctcatcatatacaatacagaaatcggtgttgtttttcctcttggtgatacatagtggcattgtcctaattcagcgacacttggctagttgtctgtcttagttttcatagtgaaatgatgatgatagattgcaagagaagtacggtactagtttgtgcagtttgacagctaacatcatctgttcatcaagatttttgtcctttcctcgaactagttgttcttagaatcccagtataggtacaccagttctctttacttcttctcgagttcctcgcgtaggaaaaacaaagacttctccgaaagtgtcaaataaacgaaagccaagtttgcgtcatgatgatctaaaattacatcaaaatctctgcattttggatgccatgtgtttgtcttttactgctggtgctgacatgatttaatttcagaaaaagatgaagtgttaagttcagctagatgttgactcgttgttcttcagggtagtagctctatgtgaatgggttcagtgcttcagtttgcagaaagctgaaaagcatcaaaatctacagcctactaagtatactaatacttgtagaactccacaagtatgctgagcttaagctacattataaaattttaacgattttacatcctctgaaatcagtatacaacatgctcgcgagacacgagaaccgaaaacaaacaaagcatgatccaacgcatagatgttatttacccgaagaaagaacaaagaactaaaatttaataataattagctctaagagtcctatcatgactagtgatatctctgtcctcttttaatacacaacaatataatgtcctacaaaaagggacggttccatgtgagcttcagaggcgtcttaatctcctcttctcttcctcagcatcaaaaaatgagatttgctgatgagaaaaaaatcagagctctcttctctcaacattagccgacaatgataaactaatacaagtatacaacactatgattttattaacaaaattaagtatacggccctgtgccaaattatatttgtctgcaaattgacttgtgcataagtgcatgtggacaaacacctaatccccgaacaaattcaggcatcttgccctatacattatgtcccagtggttaaactaatagcactgttctgaagagaagaaggataaaggaatcttttgtcagttccacacacacataaaatcctagtcctagttaagaactgcatcctgacttgcgaggcttgttgcttcttgtcacatctagaatgtaatgtaaatgtgtagtactactgatttagttaatgattaaagaattattgggaaaatgatggtgatttgcaaaatatgcttctaaaattaaaaaaatgaagcaggaacatgcaagagggcttctttgtacttgcaatgatgggatgcaagtcaatgctctcttcagaattaatccacagagacaggcaagatggcccaattgtatacacaagtacagctcatccgggtactcactgaataatgaagactagcactgcaaattgtcagtatatcttgccagaattaagtataatggatggctgcaaaaattatgtcatcttgataagcacgtacacgaataattattaggcatccttgaggattttgagaggaatgctgaagatggtgattaagtggatggatgctgtttaacttgcttgttaatcagcatgcagcagcaacgatttgcttctgaaagtaccatgtttatgcatacttggtagcaaagaaaagcttatccgattattttaagtacattatcatggattgatgataatgttcatgcaaggagattaggagaagctagtgaccaaagtggaggcaaagaggggatccatgaggaattgagtaggctgagtacttcaggcaatgaaagatatacagatttatttcatttgacagccttttgagtctaaagtttgaaagaagatatacaaatttatttcatttgacagccttttgagtctaagtgagaatgaaaatttattttctataaatctagttcgttggacagctttggagtctatgtgtgcaggaaagaagataggcgaaaccagttcattggacaaacttttcagacataagtgatagcaagatcaatataatagatatatctatctagttaaagacagctttaatgcaaattaaacttactttcaaataaaaaatgcaaactgaactttataaatctacttacaaaattgtgcagtttcttatttaaaaggaatagttattcagtaatcgcaccttgactgggccaaatgaagcccagtttatgtgggccgataccaaaaatgggccttacctgttaggcccaactcctttgggctaacactaggccgaatgactccgttgcagtatgggccgacactgtaacattgattaggcccacagcatctaaaacttttacgaaagaaaatgagggcaaaaaagcgtggtatcgcgcaaaatcgaactgaagaaacatacacaaatggcgctcataaagtgaaaaaaaacatgtaagtatactcaatggtataatgcatgctgttggatcaatggtaaatggaaatttattgaagcattattattcttgtttaaagaataaatcagcgtgtacactgtcaggaacacatcgatcacattcaccgatcgaatcaaacaaaaaaaaaggaaaggaaaagaatcttaatccatcagtcatcctcttctcctcctctctgacaacttgagcattacatccatatctttctccctttttttagtatagaaaggaaaagaagaaaatggaaggaaaaatgtggtgattaaacagaaacacaaacacaaagaagagattaattaagaatggcggcgtcacggtcgagcacggtggcgatgattaattaatggaggatgatgatgatgtgtttgcaatgcgttgctcactgtcatgcagccacgtcgtcgtcgtcgtcgcccccgacgccggcgacgtcgggggtgagacggcggtgggtggtgaagagcttgagcacgccgtcggagccgccggcgacgagctggccgtcgctgtcgtcgccggcgagctggcgccatgcgaccgcgctgacgaaggcgtcggcgtgggagaatgggtggacccagatgggcttggaccagcggaggtcgtagacgaagacgtggccggactcggagccgctggcgatcagccccgcgccacgccacacccccatccccacgaagcttcgcccgctgacgtggccgctgtacgaccgcacctccctcgccgccgtctccgccgccgccggcgccggcagcgcccacagacggtgggtgccgtccgccgccgacgtcaccacccgccgcgccgtcgccgcccaccggacgtacgtcacggcgcggccgtggccgtccatggacgccaccgcgccgcgccccagcgcgcgcacgtcgtgcaccgcggcgcggcggtcggcggagcccaccgccagctgcggcccgccggcggggtcgaactccacgcacagcacggcgccgccggcgcgcgccgtcgcccacgaccccgccgcgccagccggggcgcgcgggtcccacacgtgggctgtccggtcgtccgacccggacgccaccatcgtcgccgcgccgccgccgcgggcgtagtcgagcgcccacacccgccgcccctcgtgctcgtcgcgctcccagaccggcacgccgcgctccacgtcgtactccgtcacgacgccgtcgtagtcgccgcaccccacgtgcgacgccgccaccgcctcgccgccgccagggcgccaccgcacgctgctcagcttggccgggacgcagatgcaggcggcggggctagacggctcggcgaccctgtaaatccggatcttccgggcgatgccgccggtggcgaggtggcggccggtggggtcgaagtcgaggctgccgatggagtcggacgcgcccgcgagcgccggcgacggcacggtggccgccaggcgaaactcccattcgcacctcggcggcgacagcttgtcctcgtcgtcgggaataatgccggcggcggcgtgttcttgctgcagcgccgcctcgtcccggtgatcctgatcgtgcagctgctgctccccggcggcggtggacgtggccggcgaggaggggttgctcatggaacgctagcttgctcgcctcctcatagggctaagctagctaccaagctaagcttagctcaagctcaagctcacaaccctattcttttcttgattcgagatcgatttttttttggtttgtttttgttgaatttgatttggtggttcttgtttgtcctggggcaagaactagagagagagaaagaaaaagattgtagagagagagagagagagagagagaatggtttggttgaggtggattattaatggagagccacaggagaggagaggagccaatgagaggaaaggtttaggttgcagtgcagggtttgtgtggctgagtgaggctcatgtcgtggctgcatttgcaattgcagattagtacgtgctcctggtaagtggcatggtgaccaatcacaattcaaattcaatgcgaatccaattcaagctggctaatggctatggcttgctgagctgagctggtaggggttagttaattagtttggttaggtttggccacatatacacaggcagataatggtccaagatcgaggcagttacttgtactgtactgtgtcctggttggaatatttctcaccatttattttggttagcagtacatctcaactagtactactctcctgcctcttcttttcctttatttggaaaaaagtcaatcctccttacatgtaatcaactaatttaatcatgcatgaggccgggttaattctcatcatgtcaactattattggtacatgcatgcaaagtataattcattcgatcagtacaaaactacaaactgaaaataaattactccatccgtttcacaatgcaagtcattctagcatttctcacattcatattaatattaatgaatctagacatatatatatctatctagattcattgacaccaatatgaatatagaaaatactaaaataacttacattgtaaaacggaggaagtacttacaatgtcatacccacgagtctcctaacacacacctgaaaagacagatagacgaattctcggtctcactaaatttgtactcctaaagctcacttgcgcgtgtgtaaattcctattgaaactaaagctcactcgcgcgtgtgtaatatatatatgatttgtttattattgacgtgcattgcacattacttgttcaagaaattaatattttttttcagaccaaacaaaatttaatttatacgcagtcaaatgttggataagagaaagctagctgcctgcaaattaattaattaatttaaattttaaaaatagattaatatgtgtcgacgagggatgcccgtagaccggatatagagggtattggggtacgctggtacgaggatctacgtagtacgacatcaagcaaacagaaaacagagattatactggttcaggcccctcggaaggtaataaccctaatccagttgatatgagattatatgattgaaatcacatattacaaagggtataatagaactcgatgataccgtcgagaccgtagtcgagttggttcgactagatcacctggcgacttggctcctgtaggctccggcttcgtaggctgtggtggatgtgttggcggtaagatttgatgccttaggtcctcccggggggttccttttataccgtggtcagttggtctttaagtagaactcggagacatcagaccccacacgatacagtaacgacccggttctgtccgagtaggactccttccatccgtggactccatttctattacacgatgaatttccttaacgtgtacaggaaacatccgtatacacgcaggtataccatatcagtatacgtcgtatatccaagggtagagggtataccttatccgtaattctgacaatatgatttttaaagaatcttttatataacgatttctctttttttttgcaaaaactacatagtttagcaatttgggaaacatacaagcgggaaacgggttcttttgtttcttttgtggttgtaacaaacgcaacctagtatgtactcgaaattgtcaaagtttttgtttgtttagtactaattaaaagaggagaaattaggctttgggggacaaatgaaataaaataaaagatcgatccccattggaattattatatgtatagtttgtatatataggatcgagaaaacagtggagatatgagatggacgtccttactagctggagtagctcttttgttgtatagatagatagatgagattggtggtcacaccgttgacaggtacgcaggcagtgaacgcgtgtggaccagatcgtttccagttcgtacgtactagctttattagttggcgtaattactgtgtcctagttagctaccacttgcaatataaattattgttttggagcatatatatgcaattaactggcatcatatttagattagtagtatatatgaatgcatgtgtgtgataccgcaaccttttttcaggaaaatgtgtagttttcatatttagattagtactccctccgtccataatataagctccgttccataatataagggattttaagtttttgcttgcaacatttgaccactcgtcttattcaaaattttttgaaattattatttattttatgtgacttacttcattattcacagtaatttaagcacaaatttttgttttttatatttgtaaaaaaaatttgaataagacaagtagtggtcaaacattgcaagccaaaactcaaaatcccttatattgtaggacggagggagtagtatatatgaatatatgcatactggtggagaaactatctttggtcggtccggcaaaatccacaatagtcccggatccaaaaagaaccgggactaaagattgtttttagtcccggtaataaaaattttgatctttagtcccggttggtaacaccaaccgagacaaaagatgatctttagtcctggttcatcctctgtcagatgtatgtcagggggccgagaatctttagtcccggttgatgtcaataacaggaactaaagatcaccactttagtcacggttggtagtaccaaccgggactaaaattaaacacgtacggttggtactaccaaccgagactaaagatcaagaatctttactctcggttggtagtactaaccgggactaaaattaaacacgtagtatataatccctatccattattctctcctccacagttacaacttagacagatcgaatctcacccctctcctcagatctatcctctctaactctcctctccaactcctccccttctctccccttcctccttccttcccagccggcttccccttcccatccggcgggccggccggcggcggggccgcgcccggcggggtcgcgcctggcggagggcggcagcgccgcgcgcggcggcgggcggtggggcttcgggcggcagcggctgtggcgggtggcagggccgcggccgcggcagctggcggggccgcgcccgtcgttcgtagcgaccggcggcggcggcggcttctttgtttttttttaatttgtgatgattcattgttatgtatttgactaagaagttacaaatttgtgattcgcggttaggggagctctcttaatgacgtggtggaatgtgtggttagagagaaataataggattttcgccgatagtgctagaactgagcgtgaggtggcctatgtcataaagcaggagctagatctctgcaagtcggctttcaggccgccctgatggtttttcctctatttggcttgtaagcactatatttcctatctctaattaaattccggcagaactcctgccgtcggtttcctaaaataaaaaacaaatttgtgattcattgtttggatctgtgatgtatttgagtaatttcttaggatattgtgatgcatttgatttatgtgtataagtaactttatgattgtgatgtgaatttgggatgttagttagatttggggattgatttggggatttgcctacttgattcgggagaatataaaaatgaaaaaagaaaaagaaaaaggaaccatctgtactgccgctattgtctcttttagtccaggttggtaacatcaaccgggactaaagatcccctctctttagtcgcggttggtagtaccaaccgggactaaagatgaatatctttagtcccggatccgtactcccggttggaaaaccgggattaaagggggttcccaaccgggagtaaagatggtttctccaccagtgacatgtgcatgcagtgcagtgtgataccgaaaccttttttcaggaaaatgtgtagttttcatgaataaatctcagatgtatatttttttatttaatggtagatatctgcaggacatatatagcatacttttctatcttttttttatttcgtgttgaatggaagtcaagtactactctctccgtttcacaatgtaagtcattctatcattttccacattcatattgatattaatgaatatagatagatatatgtgaaacggaggaagtagtttacaattgttaaaaaaacgcgtctaacaatcgtgaaccctaaagaaaaggttcttgaaaaaaaccctaaagaaaaggaagtcgcgtgggggtcacatcaaaattgaacagaactttgtaaaaaatggtgttaattactactccctccgtcccaaaaaaaggcaaaccctgggtttccgtgtccaactttgactgtccgtcttatacgaaatttttttataattcgtattttacttgttgttagatgataaaatatgattaatattttatgcgtgacttgtctttttaattttttttcatatttttttcaaataagacggacggtcaaacgttgggcacggaaaccagggtttgtcttttttttgggacggagggagtatgttgcacgaatgatgacatgcatctaacatgagtagttgtaacatctatttttaatgtgttggaatttagaacatgctactatgtctgtttcatattataagtcatattaattttttttctaaattaaatatttctaagtttaaccaaatttatagaaaaatatagtaacatttataatatcaaattagttttataattcttataattttcagagtatatttattttgttttaaaaatattgctatatttttcggtagatttagtcaaacttaaaaaaatgacttataatgtgtgatttatgatatgaaacagaaagagtcctaaactatttgaaacatatagtaggaatggcttatcttttgtgttactgcgtatttctttgtaaagaccagctaactcaagacagcgttgtacgtacttatatcaggagtaaattaattcatatggccaagtggttaattattaaaaaaaccattgcaggcaggcaacaggcattgacggcattgaaattaattataattaatataatcaagactgattaaggcagttcgtatgtattcttgctaatatttttgcgcctcacatgctgtacatttttatctcgtccaaaatccctattattgatgtacacttctgcaggtacgcatggtcaattcatcaggattcaggacgaagtgctctttgattaatttctctccttcaagatttcctgggtgatcagtcaccaagttaaatagtaaggacatatttcaaatcttttgctcatatatgtgtactggggacgacgacctattgagaaggagcgaatgtgagattgtgagaggtgctccactatggattatggaaagacaagatttggataagcccgacatgcttttgatgcaggctgcagggacagaacagccgggagggtccattatgcatgcaatgtcagtttggactggaatcggtcgtacattaattactccttccgtctctctccgttttaaaataaacacataatatgatatatttagtaatcataaatctggacagcattagaatatgcatacacccctaataagttgtacaacattctagcggtagctcttaaatcatataatatatataggtgttattagaagataaaatattgaatctgatggttgcgtacttaaaatattggaactgatggttgcgtacttactctacatgtgtgtgggcatgatggaaggaggggcagaatcaagaaagaagaacaactccgcttttaagatagtagagaaataaatttattttcaattagtcaaacacatattaagaaaaaaagttaaaagaataccttgcttttattaatatggagagaaaatgttaaaagactagtatatttttaataaaaactaaaactatacttattaggaaggaggaagaagcttattactattacaacaatcgtcacattttctttctcttgaaggcaaatttgcatcagaacctcaattatattataatatatattgttcacgtgaaatcccagaaaaagaataaattcagcgaaaaacatgtgagagttttatttcctgcaggagattgtgatatcaatccccagctgctagctactccccccgtttcacgatgtaagactttctaacattgcccatatacatatagatgttaatgaatctaaacacatatatatgttcagattacttaacatcaaaaataaatatgaacaatactaaaaagtcttacattgtgaaacggagaaagtacttggttaatttgagatgaacatattgcaaggtgtgagagtgagacgaaagcgaaaaggagacacgaacaagtccagcagcatcaggatgtgtatagtagataggagtatactataggagactatagagtgagatgagttcacatattacgtgggcaggggatgagttacgtgtgcacacgtgcgcctctcatgcaaaatgcaaactgcatctgccatgcactccaacgatccatctgatatgaatatgatgcctccacctacgtacatctccggatcttctctgcctacaattacaacgtacgttgaaggggttttttttcgcttgtttagatcgatgatattttcgaacattctatttgctaaaattgatagttaaatggctacatttagtttgttatcaaatattgacaacgtgtacgaaattctggtaacattattagccaatcgtaccaaaattttagcaatattgttaatttgttaaaattttggtaaggattattttggcatccatctaaacagacacttgattctctcgctccaattcaacctatcatcctttagtcgccggtatagtataaccataacgtttttgtcttttcttttttttttctcttgaagtatattgaaaaaacttcaacttggtaactaaaccggcggcggccaagaggataatagaactcatcttgaagaattaagtaaattaaacaacatacatgaaattcatcaggatcgatctttcagccacgtgaacataactgattgatccagctgtttaagctgcacggagcacgtattaaaaaaaaacaagctacaatcttttctgcaatacacaccatagggattggggaactcgcttcaccgatcgcagagacaggcggctcaattaagatgtccatctctagaaatataggcttatttttacaggtaatcatctcagattttacaggtagtcatcttagatcctatttgtttcatcttatgattattataatttagattattaagctggattataataagctgatatataataagttgtgagttatttgtttgtctggattattggaggtatatggattattgagtttgaaaagttaaagtctataataacctcagctatctattcggttgatggcatatgtgggtaatttttctcaagtatataggggtagtgggtctttagccacttaataatatgaaaaaaactcatctagagcagcttattagattataataatctagtttatagattataataatctgctataataatctacttatttatttcagcttacttttaataagctagattataataatcctaagatgaatcaaacagtgccttagattgtttaccaagtgaaaggtttaatactccaagaaaaaagttaaaggtgctaggagattcatcttgaagaaggaaattaaataaaatgcatggaatctatcgcgatattttagccacgagaacaagattgattgatccaatttaagccgcacggagtatatatatagagataaaccgattactttccacggttatgcctttttgtcattacccacttctttttttaatttttcttttgaaaacatcaaactaaaaacaatgaaatgatggagaaatagaccctacgtaccaactaatgatcattgtgttatatattgcgaataattacgctcttattataagaaaatcaatgcccttttgttctctttgtaccaccctatctagcttaattaggttattactcatttaactcgtcctatttttacaaagatgtacaatttgtcctatatatgtcctattgtcatatgtatacactatcttttccacctctttgtcatcgatttttattccccttcttttcccgggaattatatatcttttgtttatttctgggtattaattcaatttcttttgttttgtttgtgtggcagctggcgtgtaaaaacacctgccacaaacaaggccacataatgttctcttcagggagggagatgattaagattaaagcaccagttccaatcagtacggctagctgcttaattatagcttgtgctaataagatcagacaggtaccgagtgtcatatctgtccatctttttatctacctgatgacgccgtcactatctactactccctccctcctataatataaaaaaaattaactttttcttacactgtttaaccactcgtcttattcaaaaatttatgcaaatataaaaaatgaaaagttgtacttaaagtactttggataataaagtaagtcacaaataaaataaataataattttaattttttttaataagacgaatggtcaaatagtgcaagaaaaagtcaaaatcccctatattatgggacggagggagtacgtacttcgttcgtctcaaaatataaacaattttaacggaataaaatacatccgacactaatactataaatatgaacatgttacaagtctaggtagttttacgaatatgaaaagttaaaaattgaactaaccaatgtatgacattgcttagttcaaatttgcactatctactacgaagtactatcctttttctatatgacaacgtatgaaagtaaatataggtagtatttaataaattgagttttggtattgaataaattttacaaaactacatgtattttgtacaatttatcacgaaattacagattcagtgtctccgtttatcacaaaactatatatgctttgtacaatctatcagaaaattacatatttaaaaacttatttcataaaactatagattttatatagtatatgtagttttataaaatttactctttagtatttattatcggacattttctggctaatcatataatatgttgtacggttaggtagccggagtagctaacactaatttttgatatccaatcaaatcaacctctgatcccaagttcccaacatctgaaaaaaaagtaccccctctgatcccatcgattaagccgcaaatgaaagagtttgcatgcatcgatgcaccgaaactatttaggccctgattagtttccgtaattttttttatccaatcatattaaatatttggacacacacacacacacacatatatatatatatatatatatatatatatatatatatatatatatatatatatatatatatatatatatatatagtattaaatatcgatctacagtatggagaagggacacatatatagagtattaaatatagatctacagcatggatagggcagatcagcagctaatattagcttgtgagtatttgttaatttaatttgatataatcgatcacgagaggtgattattaattaattagattggatacacaacaacgtaccgtacctacttaattaattaagagtagcaagcaaaggcattgaatgcatgggtgcaattttcatattgcatggtttggcgacccccccacattgcaggagagcacgtgcattcctatggtccatacaaactactattactacacacatctccatctttctatcatatcgtgccacgtagccagccaatagcggatctaggaagaaataacaggagagtacgaaaaaattagataaaactacaaccccttcctatttactaaaaacaaaaaattttaataaatgcttcgtgaggactctcatagttctcacaccaatagtggaggctggagaccccgtcgcccctgcagccagctactgatcacatatacgaaatatatgtatttatatattcaccaaggttttaaatctctgactattagtcactatctctagtactccctccatttcgaaatgtttgacgccgttgactttttaacacatgtttgaccgttcgtcttattcaaaaaatttaagtaattattaattattttcctatcatttgattcattgttaaatatatttttatgtaggcatataattttacatatttcacaaaagtttttgaataagacgaacggtcaaatatgtgctaaaaaataaacggtgtcaaacatttcaaaacggagggagtagtagtttaaggagagtagctatttgcatgctctcatgtataatttagatattattagacactgtaacctcatttagccgctattaactgtttgaaagggtctatacttaaatgttttagctcactatttaaaaccgggatatccacaccaatgtatgcatatgtattttgtacaggaaaaaaagcactggctctaaacctcatcgtaaattacaaaaataaaaacctacaaaaaaagaaaaagggaaaaatatactgtagtactttgtggttcggagaataaaattccaaccctgcgtgacctcattggaagctgacgaactctctctaaccaacagaaggcccacgggaatcccggcctagttctttccaggcccagataaactaaaccgagtttgggccaagatcttggggtggaattgggcccagaaagagcccaaaccattcaaactcgcgaatttaaataaccaaacaaatttagaaagacttttgaaacttcggagtagctatgaattgaagtaacctacgtgtcatgcaattgacaagttcgatgcaaatttgttgaacctattttttttcctttttttttttcaaaaaacgtacatcgtgtcccgtgttaaaaaatctacaattccaatcacggaatcacccccttaaacttgttagcaaacacgaaaaacaaaacagaaaaaaaaaataagcaggagttggagtttaaatctctgaaccctatccatgacctcatttgagaaggcccacgtcttgtatagtttaaccccatccacggttaaggataatgacttcaaacatggccagctcctatagtgtgacgggcggtgtgtacaaggcccgggaacggattcgccgccgtatggctgaccggcgattactagcgattcctgcttcatgcaggcgagttgcagcctgcaatccgaactgaggacgggtttttggagttagctcaccctcgcgagatcgcgaccctttgtcccgcccattgtagcacgtgtgtcgcctagggcataaggggcatgataacttggcctcatcctctacttcctccggcttaacaccggcgggctgttcagggttccaaactcatagtggcaacttaacacgagggttgcgctcgttgcgagacttaacccaacaccttacggcacgagctgacgacagccatgcaccacttgtgtccgcgttcccgagggcacccctctctttcaagaggattcgcggcatgtcaagccctggtaaggttcttctctttgcatcgaattaaaccacatgctccaccgcttctgcgggctcccgtcaattcctttgagtttcattcttgcgaacgtactccccaggcgggatacttaacgcatgtaacgccccgattttcgttcgggattaaaaatcatttaataatgcatttcctagaaattaaataaaaagttaagcaatttatccaagtgaattattgggagaattaaaattttccctttaaaaattattggccgggaatattttgtaatattctttgtgccctaaaatactctccggaattttccgtgaattttcggagctcgagaaatagttttaatagcacaaagatcattgcatcaattaaaataaaacgaaaacaaataaaatcctccttttcctcttcttgggccatcggcccagtccaccccgccgcgcgcgccctcctccttgtgggccggcccaagccgcccctccctctctccccgggacgccgacaggtgggccccacctgtcggacccgtccccttcctccagccggcgccgccgcgcccgcaaccgccgccgcgtccacgcctccaccttctccgggccacgtcagccacgtccgtgtgtgcgccgcgtcccccatgcccactcccctctctctcccgcccgcgccccgcgcccgagatggccgggattcgattttcgaatcccgcctctctctcctcccccacttccccacgttggccgacgattcccgcctctcccggccacgtccggccctcccctcccctatttaagcttccccgtcgctccctctcgctttttccccttctcgccgaactccctcgtgctccccatcgcccccgcgccgtgcaaccactcgccgccgccgttttcgctactccggccgccgctagccgccgctagggtcgccgccgcaccgcgccgtcgccgccgtcgggttcgcgaggctaagctccaccccggccgccccttccccgtcgagtttcgtcgccggaattcgcatcccctcgcgctccggtgagttcaactgctaccgccgctttcggccatgaataccggtcgccgtggttcatctccctccctctaatctctctcttctccttccttagggcaccccgaatcccgtccgccggtggccgtcgtcctcccgtggctcgccgtcgccgttcgccatcgtcttcctccgcgccggccaccctcggtgaggcatcctctcccttctattcccctccctctccctcctagccgccgctttagcgccgccgcccgttagccgtcgctttagcaccaccgcccgtcggcgccgcctttgcgccgccgtctccgtcgccggttgccgtcgccggcaacgcgtgtgcgcgcgccgtcgccgtcgccgtggccgcttggccggtcttgagccgagccgggtcgccaccgcccgtccgatcgaccccgagggcgatctgggccgtcggtcccgtggaccggcggtggaccacccgcgtggtcccggtccacggtgaaccgcccccccttgtgtcgctgaccggtggggcccgcttgccggcgccgcctctcccccttgctgacgtcagcgaggtccatttcctttgtaaaaataaataataattacgcaataaatcgagtttaattctagaaattcatttaaatggctcaaaacttctaaaattcatatctaattcattcgaactccgaattaagccattcaacttgcaaaattcatctaaaattgagctctgcatgtttgtttagtttttatgtactgtttccttggtttttattagagtttttcctcattttgtgtgccagcgtgtagaatccgtcgtttcggaagtccgcggtcgcgaggaaaagagttcggaagatcaaagtgaagaagcaaggcaagtcacacattccccttgagcatgttgatcccaatttacaaatgttttactgtttgcaaataaatatgcatgttttgctaattacatgggatccgggtattacctatctgctcgcttgtgccatgtttacttgatatctgttctttgtcaaccttgggtaatgaatcgactagctcatgttacttatgtgtcctagctagaactatatgcttagccatgcttaattaccactagctcagttgatgggataattacagtattagacctttttagtatcagagtgagctgcgtgctcgagacatctggccatgcttcatggtcgtaattatccaactaaaatgcgactgaatggtgggctgtgggtgcatggttttgctagtcgcacccatggcaattaaggaccggttcgcgggatgccctggaagaacttatcgtacttaccacaagccagcgtgggcaacggctgggcttgtagtgtagctttcctctagccgacgcatccaggcaagggtgggcgtgatggagtttggatgggccctacgacggcctatgcggcttccggattcacctaggcacgagaggggactgcccgctgccttgcgaggagtgggggtgaaacctgaggtgtggtgtgcttggttagagggggttatgcgaagggtcctgtcacggcctctttccggtatgtcgtggtggcatgtcggtgcacgggaacgtgtcgtggggctgtgtcttgtgggtacagttgtacacctctgatcagagtaaaactattcgaatagccgtgcccgcggttatgggcggtcgactagattcaccgtgattagtcccaccttaataaatcgactcaatacactgtagttcaggtgggttggttgggcctgttcaacgtggtgtagcgttgatcagtggagattcaatattactttaattactcaacagttttactgttttgctcaataaaatgttttacaaccgcctttatgcaaatagccacaaaccatccttgtatccccttgcacatctgcatcgttggtgtggcttgctgagtacggtggttgtactcagttttgctattattccccctttttcagaagtgtagtgcttctgagcggaagatggagttagaggaccaaggctcagaccccagttgagttttgcctgtggagtggagctgaagccccgctaggatcgcctttttccgctgctgtcgttctgtttcggtgtgaggactaagtgcctcttccgttttacgctttatttacgtttggaactgtatattacttgtcgttttgtgtaccctggctggtcctggacagggatttaatacgcaaaatagtctggaaatttgggttaaatttctgggcgtgacaacgcgttagctacagcactgcacgggtcgagtcacacagcacctagtatctatcgtttacggctaggactactggggtctctaatcccatttgctcccctagcttttgtctctcagtgtcagtgtcggcccagcagagtgctttcgccgttggtgttctttccgatctcaatgcatttcaccgcttcaccggaaattccctctgcccctaccgtactccagcttggtagtttccaccgcctgtccagggttgagccctgggatttgacggcggtcttgaaaagccacctacagacgctttacgcctaatcattccggataacgcttgcatcctctgtcttaccacggctgctggcatagagttagccgatgcttattcctcagataccgtcattgtttcttctccgagaaaagaagttgacgacccgtaggccttccacctccacacagcattgctccgtcaggctttctcccattgcggaaaattccacattgctgcctcccgtaggagtctgggccatgtctcagtcccagtgtggctgatcatcctctcggaccagctactgatcatcgccttggtaagctattgcctcaccaactagctaatcagacgcgagcccctccttgggcggatttctccttttgctcctcaacctacggggtattaccaaccatttccagttgttgttcccctcccaaaggcaggttcttacgcgttactcacccattcgccactagaaacaccacttcctgttcgacttgcatgtgttaagcatgccgccagcgttcatcctgagccaggatcaaactctacatgagattcatagttgcattacttatagcttccttattcatagacaaagcggattcagaattgtctttccttccaaggataacttgtatccatgcgcttcagattattagcctggagtttgccaccagcagtatagccaaccctaccctatcacgtcaatcccacaagcctcttatccattcccgttcgatcgtggtggggggagtaagtcaaaatagaaaaaactcacattgggtttagggataatcaggctcgaactgatgacttccaccacgtcaaggtgacactctaccgctgagttatatcccttccccgtcccctcgagaaagagaattaacgaatcctaaggcaaaggggcgagaaactcaaggccacccttcctccgggctttctttccacactattatggatagtcaaataatgggaaaaattggattcaattgtcaaccagtcctatcgaaaataggattgactatggattcgagccatagtcaatctgtatgattttcataaaatctgtacgattttcccgatctaaatcgagcaggtttccatgaagaagatcttgttcagcatgttctattcgatactggtaggagaagaacccgactcggtattcttaaaaaaagaggggaagcagaaccaagtcaagatgatatgggtcgccccttcttcttgcgccaaagatcttaccatttccaaaggaactggggctacatttcttttcaatttccattcaagagtttctatctgtttccacgcccttttttgagacctcgaaacatgaaatggacaaattccttctcttaggaacacatacaagaaaaagggataatggtagccctgccattaactacttcattttcatttatgaatttcatagtaatagaaatccattcctaccgagacagaatttcgaacttgctatcctcttgcctaataggcaaagattgacctctgtagaaagactgactcattcggatcgatatgaggacccaactacgttgcattgccagaatccatgttccatatttgaagagggttgacctctgtgcttctctcatggtacaatcctcttcctgctgagccccctttctcctcggtccacagaaaaaatggaggactggtgccgacagttcatcacggaagaaagaactcacagagccgggatcgctaactaatagaatagcactactaactaatactaatatatagaaatagatatctagaaatagaaacgaactaatatatagataatcgaaattgaaaagaactgtcttttctgtatactctccccgttctattgctaccgtgggtcttatgcaatcgatcggatcatatagatatcccttcaacacaacataggtcatcgaaaggatctcggatgactcaccaaagcatgaaagccagttagaaaatggattcctatttgaagagttcctaaccgcatggataagctcacattaaccgtcaattttggatccaattcgggatttttcttgggaagtttcgggaagaaattggaatggaataatatagattcatacagaggaaaaggttctctattgatgcaaacgttgtacctagaggatagggatagaggaagagggaaaaatcaaaatgaaataaataaagaataaagcaaaaaaaaaaaagtcgaagatagaagagcccagattccaaatgaagaaatggaaactcgaaaaggatccttctgattctcaaagaatgaggggcaaggggattgataccgagaaagatttcttcttattataagacgtgatttgatccgcatatgtttggtaaagaacaatcttctcctttaatcataaatggaaagtgttcaattagaacatgaaaacgtgactcaattggtcttagttagtcttcgggacggagtggaagaagggcggagactctcgaatgaggaaaaggatccctttgaaagaattgaacgaggagccgtatgaggtgaaaatctcatgtatggttctgtagagggacaggaagggtgacttatctgtagacttttccactatcaaccccaaaaacccaactctgccttacgtaaagttgccagagtacaattaacctctggatttgaaatcactgcttatatacctggtattggccataatttacaagaacattctgtagtattagtaatctccgaagacttctccacgaggctcataccaggcactacggcgctgaagtatgtaacccatgccatactcccaggaaaagctcgaacgaccttcaacaaaggggtacctgtacccgaaaccgacacaggtgggtaggtagagaatacctaggggtgcgagacaactctctctaaggaactcggcaaaatagccccgtaacttcgggagaaggggtgccccctcacaaaacggggtcgcagtgaccaggcccgggcgactgtttaccaaaaacgcaggtctccgcaaagtcgtaagaccatgtatgggggctgacgcctgcccagtgctggaaggtcaaggaagttggtgaactgatgacagggaagccggcgaccgaagccccggtgaacggcggccgtaactataacggtcctaaggtagcaaaattccttgtcgggtaagttccgacccgcatgaaaggcgtaacgatctgggcactgtctcggagagagactcggtgaaatagacatgtctgtgaagatgcggactacctacacctagacagaaaaaccctatgaagctttactgttccctgggattggctttgggcctttcctgcgcagcttaggtggaaagcgaagaaggcccccttccgggggggcccgagccatcagtgagataccactctggaagagctcggattctaaccttgtgtcagacccgcgggccaagggacagtctcaggtagacagtttctatggggcgtaggcctcccaaaaggtaacggaggcgtgcaaaggtttcctcgggccagacggacattggtccttgagtgcaaaggcagaagggagcttgactgcaagactcacccatcgagcagagatgaaagtcggccttagtgatctgacggtgccgagtggaagggccgtcgctcaacggataaaagttactctagggataacatgctgatcttccccaagagtccacatcgacaggaaggtttggcacctcgatgtcggctcttcgccacctggagctataggtgattccaagggttgggctgttcgcccattaatgcggtacgtgagctgggttcagaacgtcgtgagacagttcggtccatatccggtgtgggcgttagagcattgagaggacctttccctagtacgagaggaccgggaaggacgcacctctagtgtaccagttatcatgcctacggtgaacgctgggtagccaagtgcggagaggataactgctgaaagcatataagtagtaagcccaccccaagatgagtgctctctcctccaacttccctagagcctccggtagcatagccgagacagcgacgggttctccacccatacggggatggagcgacagaagcatggaaataggataaggtagcggcgagatgagccgtttaaataggtgtcaagtggaagtgcagtgatgtatgcagctgaggcatcctaacgaacgaacgatttgaacattgttcctacacgacctgatcaaatcgatcaggcacttgccatctatcttcattgttcaactctttgatgaaaagatgaaaaaaccaaaaaaaaagctctgcccttccatctcttggatagatagagagggagggcagaggcctttggtgtcccttccagtcaagaattggggcttcacaattactagccaatatttctctcatgcctttcctcgttcatggttcgatattctggtgtcctaggcgtagaggaaccacaccaatccatcccgaatttggtggttaaactctactgcggtgacgatactgtaggggaggtcctgcggcaaagtagctcgattccagaatgataaaaagcttaacacctcttatttgactttttcactattttgaaatacgaaaaagatccaaatccaaaatgcaaaggtcgtcttattcaaaacctcaatcatcacatcccctctctcccacttcacacctcggaacgcactgttcttatagagagaaaggggctttcccatcttcttaacccgaaatgaaatggctgaggagagggaggttccttttggggtacccccaggaagagatccagtggagacggggtgggcctgtagctcagaggattagagcacgtggctacaaaccacggtgtcgggggttcaaatccctcctcgcccacagccttccaaacgggaagggcctttactttccccctgagggtaggaaaaccatgatcgggatagcggacgtaaagctattgaacttgggtatgctctttccttttgtcgaagtggaatcgtagaacagaatgtgatatgataagataaaatgcaatagaaacaaggatagcgaacgggttacctactcctaagggtcaaagcaagccctttaattcaattctttattcttaaattaaagaatgaatcaaatctccccaagtagaattcgaacctacgaccagtcagttaacaaccgaccgctctaccactgagctactgaggaacaggggggattcgacctcctagagttcaactcccgctctcaacccatgaacaatatgagtccgaagcttctttcgtaactcccggaatttcttcgtagtggctctgttccatgcctcatttcataggtaagcccagagtggctctatttcattctatttcacttcctagcgcttcctatcatttaatatccatccctttggtcttattgacataagagatgtcatttatagtctatctctttctatatatggaaagtcaagaaattctcatcgaaacatcgagaaattgtgcatatagaaaactctaaagaaagaaaaaaaggagacccatgccatgattttcaaatcttttctacttagtagtctaagtttctcgatgaggataattaattcggttgttgcggtcggactctattatgggtttctgaccacattctccatgggtccctcttagatcttctttctccaatcttggattagggaagaaggagatattcgcgactcctggtggtttcattatggggcagctcatgatcttcatatcgatctattatccacctctgcatctattgtttcttagctaaacgggtggaagatccatccaatttggttatatcatggactcaaaaaacggatctgaatgtgactgaaatgcacgatcttcacaggtatcacttttcacgatacctaaaaggtggaatagcgattttcgaaccatttcctataagagaaaggtttccattactttgagaaatggattctatatcaaactatagctattgcattaaagaagaaaagaaactaatagaagtcgaagacgcggaatggtagtgaatagagagaaagattcttctggttttcttgttcctgaaaatattctatctatctcctagacgccgtagagaattgagaattttcatgtctttcaattctcgtactcgtaattggaaagttacggaaggagatccatcattttgcaatgaaaactacataaaaaactctggacaatttcgaaatcaggccaagcgtcttaatacatatgtaaaaaaattcattattggcccaccattgattagaagatttaacttgtataaatcgctattggtttgatacgaataatggcagttgtttcagtatgttaaggatacagatgtatccacaattcatttagagttacttaatagcctatttcttataccatatctctatcccgtgaaattctcgagccgaaagatggatgcatatgctatgtttcattttgctaaatgatatcaattaaacggtgtatcaattccataaattggatatagcaataaataaattagcaaaattcttttattttagatagaagaaacttttcttctatctaaaataaaagaatgtacccttctatccaaatccaatttgcatcgataaaataaatccaaattccagtagtagatgaataattacaaatttttgtgtgtacgagattacaataatttcaaaataactgacataattttttatttttcctgatcagaaaaatacatgaaaaaaaaggaggtagaaaattttttggatttatggttaaagaagaaaactggggttatgttgaatttcaagtattcagtttcaccactaaaatacggagacttgcttcacatttggaattacacaaaaaagatttttcatcggaaagaggtctccgaagacttttggggttttcagatcacaaatcgaagtgttcggagtaaaaagctaactgaatttaaatagcccaaacagatcgataaactcttaaaacttcggcttgatttacaaaaaatgatcaagctcctttgtttcatcacacaagtacacaagtgctagtataacacgaatgtttgaatcagagtagcccatgtttgatacgactgacaagtgacaagttcgatgcaaatttcattcaacttataatttttcaaatcgcctgttccaccacaacggagtagaaaattccaaccaaaatgaaggaaaattcaatttatggcaggttctctctcctgtgaggaacaaacggttgagatggtgccacgtggcgtgtatcggggccgaagcccccgctaacttatccgttacctcgctcccatcccgctaaaccccaccgcgacctcgccggccttcctccgctccggccatggaagccttcgccgccgccgccgccgcggccggcgtcttcgcgggcgccggcgcagctgcgcgccccgtactgctccgccgcagaggtgccccccggtccggccgggtgcgcctcctccgagcgccgccgcgcgccggtggggacagaggaggggacctgcccccgctcgacgagtgggacaggatggagctggagttcgggcgcttcctcggcgaggatcccaagctcaccctcgccaaggtttccttcctcccgtgtgcctgccttactactgctctcatctcatccctagagagagtagaggctctcggaataagatggaaatgtcgccttgttttttttaaaaaaattcaatgcgaattcatacttgcgttgatagataggatgtcacgagtgttctaattgtagcaaaacgatcgttgcgacttgtgagtatcatgcgggtatgtactagaaatgtttgtgcataattgtggactagtgttcaggttctactgcagccttatttttttctagtatttgtaccaccgcatatgttgttatgttgtccaatatgactgtattgttgtactccatgcttaagtttggatggtttgtgctaaatttacttatttttagtttaaaataagaaggtcgctagatggagtagtttagtactcctatatactatactatccagtcttgctaggatgttcctaccaatgtggctagtcgcaattgctcattgcagttggagcctaataatctgaggattacaattttgaattttatttttgtggctgaaccttgactcaactcccaagtagtagtactgcccaaatgtattgctaggattctaagatctgataactgcgaacctgtacactacaaactgacacatggttatttcacacgtgttctgtagcgatgtttctgtcacttgattttctcatcattagcatgccttaagtgtttttgaattattccctcagatacttctcaagaaagcagacccagatgcttcatcgctcgatgtagagaatctaattgccaacaaaaaggccaagttggatgatattttgagggagtttatggatgctaacagacaggaacagacttctgaatcaccagaggaaacaagcaagccaatggtagacaaaaattctccaagcatgtcaagacctgttcagaccaatgcaaagcaagatgagcctgctttgactctgctgcgaccagcaggaagcaaattgaagcaagatgatcctcctttgactttgcagcgaccagcagggagcaaacccaagcaagatggtccttctttggctccattacgaccggtagggagcaagccaaaggaaaataacacttctttaaccttggtgcggccaatgggaagcagaccaattgtccggggtaaaccggtgcaagatagttggcctagcaaggggagcttagctgccagaagagagtcgagcgatgttggcagcacctcaagaaagaacaatgtggatgtttccttgcggaaacccaccatacatcagagtgatgatgatgaattgaagtcgaagctgaatctgaaaccaaatattgacttgaaaatgaggaaagatatggacgaggatttggccaacatctctcttcttcaaaagccagagctttcagtagataatatgaattcaaatcaagagaagtctgatgctggacctgcctctgttgcttctggagaggataatggtgcagttgacccagaaacaaatggtaaggtacaacatcccaaatgcaacaggccatgatgagctggttcttttggatctgatggattgcaaatttttcaatcttcaggtcttgatgaaagagtagtgattgacagtattaatgatcgtgagtcatctgtgcttcctgatgatcttagtgcaggtaaggaaggcataatagatcagtgactagtctctattcatccatcatactaatgttatgttaaaattttcaagaattacagccatctgagcaaaattttaaccgagaaggcgacccttctgtggtggatgatcaatcagccgtcagcagtaatttctctatgcaagctttcttgcaaggaaaacctaagatgtactttctgatgaaactatgcacttctatttttagcataacattttcatcgcttgtaaaatatatatttgacatttctgcttaactaattgtacttcatgttgttacattgatccaaattgggtgtatcccttcttcttttgagtaactcacgtcattacagtttctcgcatgttggccgagctaccactaatatggcaattactacattgtaggaaagacttagctgttgaaacatttccatctcaagttgatgctgagaagatgaatgccagtgagaataacatgaattatgttgatgatggaggcaatgtgttatcatcgaaattagaggtaatgtgaatttcataatgtttgagcttcagcatcttataggcttattatcaaactcaacaactgtagttcttagagtgggtgttgccttctgtggaatgagatgtttccctattcaagggtcattgagtcatatttcatccttttaattcttctagatattgattataactcttgtttatggaatcactaatgcaggacatcacagagagtgactggacaaggctggagaattatgcaagtaccggagaaaaagttgaggtggagctgataaactgcagctcgaaaggatttgttgtaagtttttgtccagttttagaattagcacctttttaatcaagttataatgaactgatggtacctgacctctatcatcatttctttgccaggtatcactcgattcattgataggtttcttaccgtatcgcaatcttgctacaaaatggaaattcttagcttttgagacttggttaagacaaaagggtggcgatccttcactcttcaagcagagtgtgggcatagaagaaagttttgaggtcaatgacaggaacatagaatcagtatctagctcagattcagaacttgctgtgcaggatcaaggttctatgccatctaaggaaaaatttgaagatcttcttcgaacatataacactgagaaatctaaattcttatcatcatttatcggtcaagtatgaatcttttgttagtctccaaacattcttcagttgaacccttttagctaacatgccattgcttgttttgcagagactccgtgtttcagttgtcctggctgacagaaaatccaagaaaatatttttctctatgaagccaaaagaaagtgaagaattgattcagaaaaagaaaagtctcatggtacttactatgttgaaatgtctattagcttagttcttttgctatgcttagcatggtccaacattttcccttttattacttatttatttgttcggctgcacacactgtttttcttaacatgcaggctaagctcaatgtgggagatattgttgaatgcactatcaagcgatttgtttactttgggatatttgttgaggtaggtctaaccatattttctacgctttttcattcagtatcagcagctaactgtttctttcaaaggttgaaggagttcccgcattaattcagcagtgggaagtgtcttgggatgaaaccttggacccatcagtttcttacaaaattggtcaggtaacacttgttttttgcatggaccttatttttgttgcaatctggctttgttaacagtgtgtgtgcacccatgtgtggataaaggaggagttgcaagttctcatgttcattttgaaactgacatacctctctatatcgtctagaaacttagatacatcacgtgacaatgatcataatgccaaactttctgggatttacagaaatttattttgatttccaggttgtggatgctaaagttattcaactggactataataataaccgcatatttttgtcacttaaagatgtaaaggtacctgggggcctttccccttttccctcatggtggttcagcttattgaattgctgatttcaggctttcatttattatttttgtcatttcccccttctatgcagccaaatccttcagtaggcgcattggaagctgtcattggtgaggaactatcactgggtggagctcttgaacctgcagaagcagattttgaggtttgtgtgacttatggcattatttatcatcatcttgaaatttttcattgtttgtgatttgaaggttatgcatatttagagggcctgaaatctaaatctaatgccctctctctattcaactgggaaaaaccacgtcatcagattgttttctaacttctggctaaatgatgaaaacatgtatagctgctacatggcagttgcatcccattttctgagttatgtataatatcttagcctgtgccaaagagatcgaaactttttgtaggtttgctggtagggcctcctgcatggtctgtgattgaatatgggcatacctgagttttttcccttctattgcaagcatgttttgtcatacagaagttgatagagctctgtatttgaatgcggggagtctgtgctacccaagcctggatccttcctatcttcttagtttgtttaattagttattgttcttcattcaaacttcttttctggatattttgtggacatttctgagagctgtagacatagcagtgaacttgggtcatgcaatgtttgtttcatacgtctgccttgtggcattgattttctttcttttccttatccatccactttgttgcatccttgttttaacactccattatttgatcataattattttagtggcctgaagtggatgctctcatggaagagatgaaaaatattgaggaagttagggatgtttataaaggacgattcttgcgaagcccaggactagctccaacctttcaggtaaaatctaaaatgtagatacgtttcatgttcagcattcacacaattctgcaccttagttgttggaattgacacctgaccttatttcctttttaaatctattgcttgctaggtgtatatggcacctttggttggtcagaaatataaactccttgcacgctatggaaataatgtccaagaggtatggacaattaatgttaaatgcttgatcgagtcacaagctgaaaattgtgtgttgtcattcttacatagcatggactgaactcttgtgcaggtgatggtggagacatcattagacaaagaacagttgaaagaggcagttttagcgtgcacaaacagggtgagctgatgatcagcgtctccgtgctgtagtatttttccttcttttagcttgcgaagcagatggttgtacagaattgttgtggcagtccaattttgcatccttgtagcatgcttttgagtcgtttacacctgattttcttccttttcaagttgaaaataccaggtgatatgtagtcctagctcaactttgtagaggatgacaggtgtaaatcgccttgatacgttactacggaattgcaacagaattcgatttgcatctttcacggtgctagaattaatctaccatatttttgtttgaacaacgtagtaaatgataggtgatagcaccggtaacatggtttattggttaatctgaaatttggaatgaagataaaaaaaattaatgattcatccaactagatattaattatcattaccataaacaggtttgtttttatttcgttttcatatcgacacgaacaactcagcgccaatgaatatactcgctgtgtgggtcacagttgtttcattgccgctccaaaaggttatgtaaggctgggatcatgatataactcagcttaaaaattgattttaagaaattagaaagaactcaaagtcagacggcatattaccattctcaatatcacagcaatcacattccctaattaaagtcattgtaagtatagcggagaaacaaaatgttgaggtagagtttctgtatgaagttggcggtgtcaaacatgataattaaaccactgatgtcgtagatatggttcgtatatagacctatggtttgggaaaaaaaaaagagaccattgaagtgataatttaaatacttaatagtaatagactctttgatggagtattacaacatgcagcagtggcattaatacgccagtacattaattaagttacacatatgcaggctccattttggtttcttttaatttatcgtattacagaatttctgtagccttgctgatgatcacttggatatcatgtactagtaattaacaataggatgcatacaaaagatggcccaacgacaacagaagatgcgtgcatctgacattgtctggccttatttggttggtagtactccaattaattaacaagagatgatgcattcttgtgccttagtttcttcacatgcttggcttcacgttgagcctattcgcaatcttcacccccaacgactcatcacactgcatgaagtaaatgagttaattacatagttagtgcaaattaatagctttttttgccggaattagtgcaaattaatagcgattaagtcatattaatttcaaattctctacagtggtttaaaattatatatttcatataaaataggattaaataatttatctatggattcataaaactgttgtgctaaacatggtgttaatcatgtggattaactaagagaaaacaattaatcattactaataactactccctccgttttttttatatgacgttgattagttcaaactttaactagtagtgtcataaaaacaaaaatggaggtaatactaaattgctggtatgaattacctgggagaggtagttgacccagatggcgcggagctcaggggagaccttggggtgcgcgagctcgccggcgaagcggcggatgaacctctcctgtctatccggcgcccacgacctgtacctctccccgggctgcttgaagtcgttctgcttgtgtatcgtcgccttctgcctcctccccaccacggggcgcggcgtgatgggcgtcggcggcgcgtggcggagcggcgcgtggcgcgatgggtagtagtccacctcctcgtcccggtgcatgaagttcatggcgccgtcgtagtggttgttgtggtgggcgcacttgggcgcgttcaccggcagcatcaggtagtttggccccagcctgtagcgctgcgtgtcggcgtacgcgaacaccctgcactgcagcatcttgtcgtcggagtagtagatccccggcaccaccagccccggcccgaacgccagctgctcgttctcgttgaagaagttgtcgacgttgcggttgagaacgaggcgccccacgggccggagcggcacctcgtcctccggccatgtcttggtgtcatccagcgggtcgaagtcgaacctctcctcctcctccgggtcgatcacctaacagtattaaataattaattagaaggagtactgcggcttcgaactcagatcgtataggcgttaatttctggatgatcacctacctggacgaacagcttccactcggggaagttgccggcggcgatggagtcgtagaggtcctgggtggcgtggctgtggttcttgccgccgacgagcgtggcctcgtcgtccatcaagcagctgacgccgcaggtgggcttccagtggaacttgacgtacctggccttggcgtcgcgggtgacgaaggtgtaggtgttgacgccgaagccgtccatgtggcggtaatcggtggggatgccgacgtcgtcgaagaggaagaagaaggtgtggaggctctcggggtggtgggacaagaagtcgaagaccctccagtactcctggacatgggagcgcgggttgggcttgaaggcgtggatgacgtcggggaacttgatgccgtcgcggatgaagaagacggggaagttgttgccgaggaggtcccagttgccctcgcgggtgtagaacttgacggcgaacccgcgcgggtcgcggatcgtctccgggctgccgcgctcgtggatgacggtggagaagcggacgatgacgggggtctgggcgcccggggaccggaggaagtcggcgcaggtgatgtcggtgacgtcgtgggtgcactcgaagaagcccttggcggaggcgccgcgggcgtggaccacgcgctccgggatgcgctcccgggcgaagtgcgccaccttctcgatcaggtggtagtcctcgaggaggatcggccccctgggccccactgtcagcgcctcgttgtcgttccacaccggagctcccgcgttcgtcgtcgtcgtcttcgtgtcgaacgagctcgacggccggaactgcatgggtagcacgtattactattaattaattaattaattatatacttaatgatcgactagctgaatcaaccagccatgcatgtttgaagagcttgagactaaaaaagaaatattcgtagaatctagtcgataatctaggttatttcaggaagtttctgataatcgaccaaatattctataagaagttaagctctctcttgaatctacacaactagctaaatgaaacctcaattattaactacaagattaagtagatttagtctcactagtcactgagtgactgaccttgcaaggatccatggtagtgggctagtggcagcagcaggtatctgggagtgagaggggtttgtttctgctagctctccagcttgctcggtgagacagcctgcctaaaggttatatagcgggaggtggtgaggagcactgacctccccggtgagcttaccggagaccggtgccacacactgactggtgggcccgggtggccatactgcatggttgggtcccacaggaactggacgaggataaggtgaggtggatgtgggcccccctcgtgtggaaaggaaatacatgcattgcctggattggatgcatggagtgtcatcacttcatcagtgctcactagctgcgtgccatcactgcatgtccatcgtcagatcagatcagatcatcggatcatatctcttcgattgatttcaacggcgccgaattgctgccatcgatagcttagctcatcccctttctcttgatcggtcggccaaagtttgacatgcttgcagttgcagctaacgtctctgcattttctttcttgtttctcagattaatttcaggctgcttaattattctgtaagaacgaggtgctctttgtgctagctagctatggctcagctacaccctcgtttatcataaacatacacgtttctcaaactgtaagctataaacagtgtgtttcgtacaaaatctttttatactatataaaagaatttaatggtgatggtgaatctaccatcatttagagttggtgagatcttctaatgctacataaatacatctttgtgtgtggtttggttttctattggatgtttgattgcaattatgtttgacaaatacaatttctaaatcaagaaattcacataaatcttttaaaatccgtccgttgcagagcacgttactttgctagtctttaaaattttaaataaatttagttttcaagtttataataggtaatactgagtttatcatgtactattcacctgttccggttttcatgccactaactagctcagtcaaactcctttatcgaacacagcccagccagaatgcacccttgtctttttacctagtgctataagaggaaccaattcaagatgatgatgattgatttaccttgtagcattactacgcagttcaaattactaacctttcagattaggtacggtctgaatatgtgatggaagatcgaagcagctgtatctcataaaataaattacagattccgtctggaaactgcaagacgaatttattaagcctaattaatctattattagcaaatatttattgtagcaccaaattgtcaaatcatggcgcaattaggcttaaaagatttgtctcgtaatttcaaggcgaaatgtttaattgttttttttctacatttagtactctatgcatgtgtccaaacatcctatgtaacagcgtgaaaaattttgtttgggaactaaacagaccctgattgtgatgcaacccataagtaattgcaaaactagctagctatctacagcatcatcagcatatatcttggtggtctaaacttctcaggaaacaaaagatgagaaattgttctgttcttagtccacgctgatgataacgataggtgtgctgtggtgggcacaagcttttttctttctttttttttttgaggggaaagttgcttaagatgaagtgacataaacaagattaattcgaggaaaatgtgcgcatctcagatgtgtactccatttatacaaaacccagcaaattaagaaggtacaattatctgacagactagcgaacaaactgaaaattatagtcgtagtactacaaatttgcagtttgtggctgaggggaatctatcccatctggtatatgctgtcactttgtgctagtactgtactatgtactagcctgtagcctctacttttgtaattgaatgagaatatttgaatgttttacaccacataatggaacagctcaaatctcataagatcttggagagatattcttgattactctgattaatgggtcatgtgttgatgcatatatatatatatatatatatatatatatatatatatatatatatatatatatatatatgttaatgaatcaaaacgcatgcatatgtctagattgaatgtgggcaatgctaaaaagtattatattgtgaaacggaggaagtagtagtcaaatggtgctaagatctgggttttcatgaaacaacactagacaccaataatgcaatcggtgggtatgcttttgtctctgacgactaattgccttgtgaatgaaaaagctttggattttagctcctaaaaatctgcaatcttaatcaaaagggagaaatgcacaaaatgagctattggaaagaaaggaactacgatatcttgcagaatatatttcaaataaaaagatagttgcttattcgttcgagaaaacaggttatcaatttggtacagatttggcttgaattttacattttaatgctagttggtgaaccgtccagtactctgatggccatattaataatttccccataaaaaaacataaactaaattcaacctcggacactcaactttatattgcaaatctgaaataattttactgcattagaaaaatcagaagatggctgcgagtaatattagtgtcagttggtgaactgttgagtactcccatttccatatatattaatcattttcccatcgaaaaatgagaaaccaaatgcaaccactcaactttacattaaaaaactaaagtaattttgcactatatagagcattaaaaaaatcagaaaatgatttcgagtaatgtgagtagtcatcctgcacgagcttgactaatgcttttggaaaaagggagtaattgaggtgaggtgtgagagtgagattccccacctgtgggtacatgacaaaacaaaccaatcttgctgttgaagcgcatgatgtgagataagatcatcaatcagcagcaccaaaaaatatctctccttctattgcgtgcatggtttgttccttacatgattctatcttgagcagtgctcattcttcagtgatcattagctgtttcttgtaacttgtaagaacttgtttgaagcgcaggaatatttttttccttgaagataaatatagcgaaattggaatgctgaattatcaattaccggtgtgtaaatgccctctgatgaaataagaagagtaagtagagcacaaattttacagtaacaaattaagggctcctttgaatcgtaggaatgaaaaaataataggaataggaaaaacacaggattctgacaaaaatacaattgtaaaacagaggattgcaaaacacaggaatgaccgtttgattggaccacaggaaaaacgcaggaatcagatgagagagatagactcagaggaaatgttccaagaggttagacctcttgctaacttttctctaaaatgtgcataggattaccccatttcataggaactttaaaggattggatatgatttaatcctttgtttcaaaggccttcataggattttttttttcatagggttaaaatcctccaaaattcctatatttttcctataaatcaatggggccctaacaatagtagcatatgctagtacaagaaacaagagaagagaataaaataataacactgtaattgaggatttacagagaaaattaacgtatatataatcacggaatgaatgctttccaataggttcacgtggtgatccaacaagttggatgttggattgttgattgatgccgaaaatgtttggggctgaatgcaactgaaggaaagtgggaccgtgcatgctccaaaagaattgcatcgaccgtacagtagcgctactgcctacctaacttaatcatgttgcaaagagccagatatttattcaccaattacacgtctgatctcaatcatcattactcctagctacagtttgttcggtttcaaatcttaaatttaatccattcaaaaagtttcagttttactgcataagaaacatctcagtaaaaggaccagttgcttctggtaataacatatcccaaatttctgtcaaattccacggttgcagtatgagcagactgtactgaactctgaagatctcaagaaatctcaaaccgatcatacgcttgattagcagaacgatatcttcttcatggacaaaaatgagtgagcagtcagaagtctttctttcagacgatagcagcctcctactgatactgttcatgcatcctgcttgtgcgtttggatctccttcctgcaatttcatcttcagtgacagagacgccacggctgcgaaggatcgatggtgacatattcttagctaaggtgatggactgatggtccattggaggaccgaaccaccagctatcaccttatctgcaatttggatctctttgtttgtaatatataccattattcatactctccttttctttgaaattctattcattacaactggcgtggtagagtcgcctgactgtatttcgtactatcaatagagacaccgtaaaagcgaaagggtatgtaatggttgcagtgaccgaaataccacgaaattctgagttcaaatctttatatgtatgtaaaaattgtcgcattataccgacagcctcatcttttagcttatgcttatgcttataagccaaaatttaaattttcaacattaaatttggagttgattttgggatttttttcaatcgtagtttatttttcagcatttgcttttagatcgttaagaacacgtatataaaaattttatttataaattatttttcgtttgcaaatataccgtttcgcttataccgtcgataagcgaaataatggagtcccgatcgagttagttgcacaagtggtttagtgtagtacttataatctgcggggaccttacatagaagttaaaacctttgcagagcaacttagcaacaagacaatcgtcatgcaatcgtgataaggttgtagattaatttccatgtttatgtatgcagtgtaaccatctggaatattttcctgcaagcatccggacaacgctgtcaaaattatctagattacccgactttctccatggacacacaaatcatgagatattgtacatgtagaaaaaaaacgaagttgaaaaatatgatgttttaagatggaagctttattaaactcaaatagttacattacggtgatacaatcatagtgaaaatactttttttagataagggtatttttactcggcctctacattcaaccggatatatgtaacatttttaaattaggaacttggccccctaaacagtccaatcttaaattcgctcttataaaaatttgaaccaaagaatttagggtgctactcatgttactgcaccattacatgccatttcgctagtgaaaatacctttggcctatgtctataactaagatgcatattaagaaaaaaaacctcaaatgcatatgttagttatctttaaaaaaaagaaatacggaaaatgttaagaaccgccaatcaatatacaagatcatagtccatgctcctaggtacaacactcgaatgttgtaactagtgagccgtccgatcctggaggagtggtctggattaattaggtgcgagttgattaattcctcgtttgatagggagagtgacaaccacatgccgtccaccactagcgagctagctctgccagtgtcacactgccagtgaagcaagttggcactgtcaccaagagagcggcattgcattgcatttgcgtgtggaaattacactaagctgatgctaatcctgcatcatgagctgctcatcaactaaatgaccctcacttttggtaattaatcccttccttcaggaaaaagttggagattcagacatcctcaaatcagaacacagtagactagccaaatttggttgcccagctcatcctgatactttgcactaacagaagggttcttgatgatcaagtacgctttgatcaggaaataattggggatggctagtgggaaatgaccaaatatctcaatcaacaaagccaatcaatctcacactgcaaaaactaaagcaagcttttctctctcccggctgggtgcgtaataacatgatccaaaaagacatcaggtagtactcttgattgcaatttgcaaactaaccacccaaaaattatattgatatggtagaaatataatagaaaaggtacttatctagtttatactatatatgcatattatgtactgagagatctgggtgtcatgtcgatctgatcatctccaattctttattaattagtcatgtataagttgttgagtcatccattactgcctttttctttttttttctttttttgataactcacagccttaaattgtttcatatacttccagttcactgtattggaacaatgtaacattatgagaattgatgggcaatcaagaaatgaacaggataaagaatcattctcgtgctttgcatagtgatagcactgtagtgtatactttctgttcgttacagttcatatggccttctctagggaggcccatctacagtgggagcccagaagcgcggtgccaagagcggggcccacgacagcaccaatgtattcacccatctaatctgcaccgtacaacttcgatcgaacgtctcacggagatcaaagcgagtcagagttttactctccgatcccccttggatccccaccgctataacgtactactccctccgtcctaaacaaacgaatctaaaatagaatataccacatcctattacagtgaatctggataaaaggtacgtctaaatttgtactactagaatatgtcacatccagtactaagttggtttttatgggatggagagagtagctccatcctataataagcgcagatgtgggttttagtgtctaactttgaccatccgtcttatttaaaatatttttatgattaatagtatttttattgttgctagaaaaaatgctcgtgcgttgcaacgggtgaatgctattttaattttattattgttatacggtttagttaagatgaaattcactttcggaattcgcttggatatttttttagaaaatcatgaactgcaattaggagtctgactttcatctcaagttagcatgcgagtttttttaaaagatatttcttatacgactccttttatatttctaaaagcaaaaaaatttaaaatccgactcaaatacagatctatattttgaaaagcgaacgaacttaaaaaccgactcaaatacggatgacataccaaaataccggcaaaaacatctttaatttttataatagtaaagattagatgataaaatataaatagtactttatgtatttatgacttaacttttaaaattttttataaatttttcaaataagacgaatggtcaaacgttaggtacggaaacttatggctgcacttataatgggacggggagtattactgtaacgaatatacgctaacacgtggatccacccgccgacggcgccactccggccaccggaaagccgtctccgcttttctctggatggcggccatgcatccgccattgacggggtgaggagctccatgaaagcaagcggtggctcaaaggttcagagttcagaatgggcaatagatgctacggcatatccttgtgctctcacagtagcttgaagtcctgcttcatagtctgtaaaaaaaaaagaaaaaatttgatccatagcacataaaaaacccggtaaaaaaaatagcacaacaaattttccacttcgactaaaagcacagggcaccaattttcttgcgattcatagcactcccgtcacatttgtcatccaaacatgtgagttgatatgaaaaaaaactcatctacccttcttccccgagctagtgctcttctccctcagcgatgttgccgcgcccgtgtcgccgatgctcggtgagctgacggagccgcgcttcccgcccgtccgctcgcgaatcatcccaacgtccgccagcgcgcgctgcaacctgcctgcataagcggcaggtcatcgtccccgtcattgtcgtccccgtcgctctcatcgtcgtcgtcgtcacgtagaagcagtggcaagccggcgcggcgctgcgccgtggcgagggagaggctgttttgcggtgccgagtatggccaccacgggccacatccatccacgtcgaagctacggccgcccacgtcatcgtcgtcaagcggccgccggcgtgggaggcttgccctcgatcagcagcgccgagtgccagacgggatccacctcatcgtcggtggcgacggcgagccacgcacccacatcattgaagagcgcacgcgcagctcgctcggcagtggcgggcgccgcgcgccactgtccatgagggagcggaagagaagacctggtgggtaacgtggggaacgaagggcaaatgtgtccgacgaaaattttgtccactccgatctaacgccgttacttcaaaatttgacggaagtgttacaaggcgaagaaaaatcggtggcctatgctatagatcgaaagcggaaactttttgtgctattttttggtaccgctttctttcctgtgctatggattgaattttctcaaaaaaaaaaaagggttgtggaagaatttccacggttttcccaggtggattattattcacccgattaagtgagacaagaatatacatagctagtcagattgatcataaatagcatcgcatatatcagaataataagtatcttgtatcgttctgtattgtttggggtttgctgaaatctgaaaaatatactacacatgttcagagttcacaacttcagactgacccatttcaatctgcgcatacagagatgatacatattcatacttgttttttctgcaaatcttgtctgcaatcggaagtgtgcatacatgtgggatgtgttctgattattgcaatcggcagcatgcatccatacggctcggtttgtaggtgaagaactgaagatacaaagatttccaagagggttcggagttttattctccgaacaccttgggtctccaattttttttatcagtaatttctcctctcagtagagtaagttcggcccgataaaattccaaatgcgtgacatgtatgtataataaaatgaaatccaaaatgcctatgtttatttcggtgaatatatttacctacctgacgattcactgacgagcatgtatgcaccgctatgaaggaggcttcaagttcagaatgaatcagatcaatagacggtacagatacatacttcagacttgctaccccatttttcactgaagtacaccacccctctctgaacttctcatgcaggagtaggaaccacacaattgatagagagattgaattagcatgcccaaggggggtctgaacccccccttccttttttaaaaaattatcttctaactgtccactacttttttttagaaaaaaaaaacgaagcccaaataaatatgcacaagatcgatgcatgtatgcatgcaacagcttccatatccatgcatactgatcgatatggcatatctccagagttcagaaattcagaccaacccattttcttacagttcaaatctgcgcctgatcaacggttcgtttttcaaactatctttttctgcattgataggcaatcgtgtaatgcagaaaaacggttgcaatcacagattacatatgatgcgtacgaacgtgttgctaaatggaactaattcaataatcatacgcttcgtaggcaacccaaaagaggggtcggagttttcttctccgaaccctcttgcatcccccaatttttcaatttgtgatcttcccactggctttttttctttcttttttgaaaggaaggtaaattaggcccgtttaaattcaggcacaaaagcagcaatatgaactagtggctcgatcaaagccggaaactttgagacacctttgtgcctaatagatattctgctgtgtcctaacacaatagcaagttgcaatgatctgcttcacactcgagaggcatggaatctccattttcctttagagcacacaaccagatatactctgcaactttaattgactttgctatgttcagtatacgatggtgtttggttggaggggctaaagtgggactaaactttagtccctctcacaaaaatataaatctctaccatagagacttatacttttgtgagagggactaaatttagtccctagttcccaaacacccctatgtacctcaagatcatgcatggatgcatgcttgctgctgactgatcgatcgattgactgcaagttccaactaaaacagtaacgtgaaattgcgtctacaccaatgtgttcatccatctaatcttgaccgtacaactttgatcggagatcaaagggggtcggagttttcttctccgaactcctatccatacacgacggtcatggatgcgtgcaggaagcttcaagtacagaatcgatcgagagatctacatgctgattaaatggaagtaatcagatatccaaaggagttcggagttttattctccaacctcctttgaatcccattattttttctttgatatcttcccactgactaatttttgttttgagagaaaactaagcctaaagtaaatttggcccggcccatctaaactggaaaaagttcacgtgcaagttcagtcttgacaacttcagaccggccaagttcaaataagcaccttaccgatggatgtttcagatgcaatgccgagaagagagggctgcaattgcaatggcaagctacatacgctcatatgtacgtgttgttaaatcctaaatgcaaccaactatatactgcgtaggcaactcaaagagggtcggagttttcttctccgaccccgcgttatcgccaatgaaaatcatctcgctgacttttattttttataaggaagctcggcctttaagtaatatttggtgagcctgaaaattaattgatacgatgatcacctaaacacaagtgcaagttgcaatgatctgcttcacactcgacaggcaaggaatccccatgtttgatcgggcaaaatagatgcagttgatgtggttcttggaagcctcctcggttcagtaactggaaagttgctgatgataaaaactaaaaagtaagacctaattatcgtcctctacactaatatatggattaggtccctatgacttttatggttatcgaagcagaagctagctactacaagattatggttgcaggcagtatttagaactacgagtaacagtaagcaggccacaggacaggagacatagtaattaaaatttacttatgtttcttcttcttcttcacagttcacatggaaatcagaaggaagtagcaaaaggaagagctgttctacactcgacagagtaacaaactaagagagcaacacaagtaacaagaggagagatttagtctcttttctggtgttctgcaaataaaactctcccctcttgctacccctaaaccccaacccaaggtagtagtaagtcaccccactaaaagtaaccggccatctcttacaaaaattggctgtctcctttgaatcaatcgaatcagatcatcatcatcatcatctacagctcgtcatgctcgtcgtcgacgccgccctcgccgtcggcgccgccacccggggcgccaccggtcctctggtagacggcggagatgatggggttgcagacggcctcgacctccttgagcttctcctcgtactcctccttctcggcggtctggttctcgtccagccactcgagggcctccttgagggcctcctccaccttctccttctcctcgctctccagcttgtccgccagcttgtccttgtcgccgacggtgttcttcatgttgtacacgtaggtctcgagctggttgcgggcgtcgatccgctccttcaccttcttgtcctcctccgcaaactcctccgcctcgcgcaccatccggtcgatctcctcctggctcaggcgccccttctcgttcgtgatcgtgatcttctccgacttgccggtgcccttgtcctcagccttcacgttcaggatgccgttggcgtccacctcgaaggtcacctcaatctggggggtgcccctgcaagtttaaccaacagatatcaggcgctggattcatttatccatttgagtaagctaacatttttttctggacatgagcaaaccttggtgctgctggaatgccagataggtcgaacttgccgagaagacggcagtccttggtcatgctgcgctcaccctcaaagacctacaccacaaggcgagattcagaggcgttaggtggtctgagctgaaattttctgaccaggatgtaatgtcaggactcaaagaagaaagtttgcttatgtctgttacctggatggagacggttgtctgctgatcctggtaggtggtgaacacctgggacttcttggtggggatgacggtgttcctggggatcaacttggtcatgactccaccgacagtctcgataccgagggtaaggggtgccacatccaggagaaggatatctgcgtaccaaaatcaaagcacgataagtatatgcaagacagatgatcgcagttgttaccaacccaaaggactatgtatgtgatcaaggtcgaacctttggtttcgtcaccgccctcgccgctgagaatgcttccctgaaccgcagcaccataggcaacagcctcatcagggttgacacccttgttgggctccttgccctcgaagtagtctctgaggagctgctgaaccttgggaatcctggtgctaccaccgacaagaacaatctcatgaatctggctcttctcaaggccagcatcgtccatagccttcttgacaggtcccatggtcttgcggaacagatcattgttcaactcctcaaatctggcacgggtcagcggctccgagaaatcggtcccgtcaaagagggactcaatctcaacacggacctggtgctggttgctgagggccctcttggcacgctcagcttccctcctcagctttccaagagcacggttgtccttgctgatgtccttgctgtacttcttcttgatcaacttgatgaagtactccatgattctctggtcaaagtcctcacctgaagagatgagacagttcagtcaaatatgaatcacagtgcactatccagataatcaagacgaccaactaactacaaaaggcatgtcattagtttaaaagcaaatgaatagtgccaatcttctaaaagacagcgtgcctttactgaaaagtctaatgagaatgtgcaggtataagataaccaatttaccatgatgtgttgcatgaaaatcattgaatcaaactacagtactctacaactgtgatgttgtacagaagcagatatttagtacctaagggcaaataaaagcagtcatacctccaagatgagtgtcaccattggtggccaacacctcaaacacaccgttgtcaatggtcaagatactgacatcgaatgtcccaccaccaaggtcaaagacaaggatgttcttctcaccacccttcttgtccaaaccgtacgcaatagcagcagcagttggctcattgatgatcctagcaacattcaggccagcaatgacaccggcatccttggttgcctgcctctgcgcgtcattgaagtacgctgaaaacatgaaagagcagaagtgagcaatggcttccacagaatcaccgcttgagttaactaagcacatgaatgtcttgtcattactaaccaggaacagtcacgacagcatcgttgatcttcttgccaaggtatgcctcagcagtctccttcatctttccaaggatcatagcactgacctcctcagggctgaagaccttgttctctccatccttgatcttgacctgaatgtagggcttaccgtccttgttcacaatcttgtaggggacaagtttcatgtccctctgaacttccttgtcttcaaacctgcaagaataattatacaggtcagatcaggcagcagtgatcaacaacaggaaataagagcgagcatagggtaaagtgccattactttcttccaatgagacgtttgacatcgaagatggtcctctctgggttcacagctgcctggttcttggcagcctcaccgatgagcctctcgctatcggtgaatgcaacccatgagggtgtgatacggttaccctggtcattggcgataatctcgacatgaccattcttgtacacaccgacacacgagtaggttgtaccaagatcaataccgatcacggtaccgagcttcttggtctcctccttcgcaacagaaaatgcaaacagggatcctgcaaacagaggagcagtggcagtatgtaagctacatgttctatcaattcaccatttatcgtgtattggcacacatatacacaggcatataattcatgtgattttaaaacagtaacatgaattatgagaccaagtaagtttctaaggtgaaaatctaggcagcccgtttcattcatgccattctagcacattttgcgcctctaaactattcagtgttgccctagaaatattttactactagcatattcagcataattgtgaaggtaaaaactctaccgctaccaatgcacaggacagatcatggcatcactgcaattaaaccagtatctaacaaacgaattccaacaaaatcactgagcactactaggataaatcataaataaaccccagatcacatatttcttggagtcgccagactcgccgccttcacctattggtggcatctaagtttaatcgcacctcaatttgtgaagtagtacaaaaaaaacaaatatcaaatatctcctaactaactaccacgatccatacgatccatcagtgtcactctaaaaccatttaccggaccatctcgttgagaaaaaaaaaaactactcccggatccgtgatccagtggaacgaacattcacagcccatcttagatcgaactccagcacaacatcaaatagacaaatctaagcgcgcgcaagcacagatccaaacgaggaacggggagatcgcacctgcgagcaggacgccgagcaggaacgcgcatccgcgaacccgatccatcgccgccaacaccaccaccaccacgcgctcgtctcctcctccacctctctctcgaagcttctcttctcttctcccttgtgcgagtttgggttgcgatccgaaaaccttcaagtgagtttgagttttatgggttcgtgggcgatttataaggggagatgacttgaacgggccgagatctagttgcgcccccgtcgcgttggccgggacgtcatgagtctgacctggaccagtccgagcacgacacgtggatgccccaaccaatcgcggtggtctctgtgctgggggagttgcggccgtccgtgggatcgatccgacggcggagatcgtcccacggcgtgaagtggtgggattggttgggtggcgtggctccccgctcgcggctggtcgggacccgtttactgggcgtggcctccccggcagctgacatgtggacctacttttttaatcggcccaattagatactcctagtttggcattagtttgaaccggtttcgtggatttgccatcacaaataaagggttgttcagattactgttaaaatcaagttagtaatattgtcaatttggtaaattaggattatgtgttgttgccaaaattttcaatgcaataatatatttgtcaattttaccgaacaatgttatgtcttaaaattgcaacaatctcaacaggcccaatgtgtaattgcatatctccatcaaaaacggttgaaacccattatacttgctattgaactgacagattagacgaataccattagaaaattggtttttattaagattagggcaaagatgcctttttgttgacgaaaaaatcgcacactgacctgggagatctgcttagctcctgtgcaggtacaaatcttgatgagatgtgggcgttccagtcaatttgatcctgcaactaacaagatatgcaaatagtagatcaaaacagccgatcggctaacaagccgatggagtagttatagctaatcgccaataatagccgatgctgataccagccgatagcgatagggtttagagcaatcggctatatgtccaatgtagattctaacactttagtaaataatgttatataggcaatcggctactgataataaaatataacaataatatagtccagtataaaccaatcggctagcattgatatgataaataagcatcgatccgaaggttaaagcatatatcggctggaggtccgatgtcatgaaatccacaagattatattaaacagtgaaacctctgttgtcatcggctaaatccaacttatatgtatatacaatcattatgagccgatgcaacgtccagataactcatcggctcaaaccccgatgaaacccttattggcagtcaaaaagcaggctagagattatggttctaaacacgacttagtagatcaaactcaactgatgcagcactaagtatgaaaagaaacataatatctagacaatcaagccgttgactaagttttcagagtggtagatgtctaagctaatctaatctagcaacacgatttagccgataccggcagaaaccctaaaacgagaagcaaccgatagagctaaattgatatgctaagactagattaacagagacatatgataaataggtaggcaaatatatcatcgaaaccagagcaatccaagaggtcgaatgtactgatgcagccttgaacgacgccgatatagatgagacaattgcttgggccgacggaacattggacttaccccttcgctggagatcgaacatcgatgcagccccgcgtcaggtgccaagtcccgccggacaataaaataaagtagaaaaggtaaaaggggtggcaatgcgacgaattgtattgatcgtgaggatagattacataggccccgggtgtacatatttatacccgtgggttgatacaagtccttgtcggacaagaaagaaactaacctaaagataaaaggaaaacataaagtccttattggacactaaacacactttcctaaagataaaaggaaactaacaaactatttctaattaatagataacttgccacgccgcatcctctttaaactcggtcacttagggataagcttcctttaatagattgatttccttaaccgaatatagcaggaatccgactattggcgacttgataactcccatcggctgattccgagatgctgcagccgataatgattctaagccgatgacgtctttgccgattaccaaatttcactgttaacacctttcccatgaaattgaaagattaacacaacttatccaaaatctagctattgacaaccttgactacacaatacaacattgatagaaggttacaaccatcttcctcctcctcctgcaggtgatgtagtatggctttgttgttgttgcctccttttttaatcctattaagcatatcactaatttattggtagtggattctaaattctcgatggatatcctcttgttgtttgcatgtcacctaaatggttacgagaaaaaaatataaaaaatcaacaagatagattaatatatgaaaaatcacttcacaaatatgtaagttaaaatttaacttctacaagttgcaacggaaaaaaaattaaattgtggctagttaatgtatattcgcagtcaaatttgtttttcgttgcaacctgtagaagttaattttgacattgcatgtttgtggagcgatttatcacatattaatcaatcttgttgattttttttaaaaaaatcataactatttaggtgacatgcaaataacgaggggatgtcccctcaagagtttaaaatagtttcccttttatcttatactaggagaaattttgaaatatcacacttataactttattactatcaaatgggtcaaattatactaaccttcgtataaaaatatgagctagaaatgtctgaaaaagttatattctggtacagatgtggtaacattttttaattggaagaaatttcacccaagaaactcattcgactgaataaattgaggttgacaatgtccatcggacagtagtacaagacgcaagtttaagcagacatgtgttgacggatacagtcccaatttgtcattacgccttcagaaaatgtgactcttcttttgaccatccaacaagatactacttccaaacaaaaacatgctcatgatagtggttgattctttttggacagagggagtagttatttttgcacaagtagggataatttaaacaaaacagttgcttcaggtacgaccttgtcaaaaagaaaaaagcacttgccatcacatcatttttgcatggattcaacaaatcttacactatggagagcagatttaaaagagagaatgtctagtggaaactgcaacctacgtggaaacatataaactacagttggatagaaaatgtacatcccatatatgtccacgtcgtccaagttaaaatattcagaaaaaacatcacctgattctgacatttagcatctcagtccccacatcaagcagtatcctgattcaaaagacatatccccaaatatgatgatgtggtagtgagggcaagggttgcggcgcgggggtggccactcatggaaaggagatggcagtggtcgctagcagcgccaccatttcacgcaagtcacagcaacacgaatcaatccccattatgctccggtgatgtcgaggcatctaccaacggggttgcctagtatttgtcgtttgctcctccaacattaggtcattatctcctcttaatccttgctatagtgaatgcatgttctttcatgggatatgcttcttgttgatttggacaccttcccaatttcaaatgagctagggtttcaatgccgccggcactcccaatttcatatgaactattgatgctgccaagacagctacaacttccatcgcatgtccttccctctatcttggaatattccctcattggtagaccagaaatttgctcccacacaaaaggtattaatggtgttcctctatattgttgatgttcgttgagtttgtgatgagctagtcttgacactcttctatgaatccatctctctcacaaacaagatgggatcagtttgtgttgatgtcttggttgctttgagccccccattttgttgtgactttcttgcttggggaaaaagcatattattttcattaagaaaacctgaaatgttttcttttcttcttttctttgctagtaaaatccaagtactttgttgggttgttatactttcctaataagtgaaattaattgcagtttattattgtttcggtgcatcaatagattccatatgtatggatgaccctctaacattcttcttggaatgggttgttagcattatatatggaaaagtaattatatatggaaaagtagggaaaaagaaggaaccattgtgttttggaaacactttgggcgttgggtaaatggtgtatatgaaaaatgtacacaacatgatgaggagagtattttgtaaaatgtatcgtggggatggcggggctgacaagtcttcatacaggctgcacattttggatccaatgatccacgatcgaatttacaattttccatgtaggttgcaatttccactaaatacatatttttcctagatcttacaggcactcttcaatctaacttctcatttatgttatagactatttttcctagatcttaccggcactcttcaatctagcttctcatttatgttatggactatttttctaccaagtacaacacacgggtagcaatgtctgggtgatttcaacaacaacattaaattcgctggtataatctacctccatgtatgcctttccttgatgctccaccaggtcacttatccgttctgcaactgatatttcacaaacaataacaacaaatcaaacaaagacgacaaaacaaggaaacaataacaacaaatcaaacaaagatggcaaaacaacgaaacaataacaacaaatcaaacaaacaaagagggcaaaacaaggtatgacttactgaattttttcgtaagttgcgatgctgatcctgctaacgatagcctatatattagctttgttgctcaattcatactcaatttttttcagaacaacatcaataaatgtccttggatgggttgcaagataatcagcaattaagagttgctcacgcggtttatacagtgttttatcctataacctcataagtaatagtaggtcaccgaccccctttgttatgtctcattgtgtagtacccattaatagacccatgcacatttgaattgtctgtccacacaactaagttgtcaattcccatatcttcacatgttatgaaaccaaattcaactccataagctcatgagtatttttacatgaaatatctctaaagaacttggcaagttggaacttctcctcaaaccatatggtaatttaaattgttgttttcccaatatttcccgcttctccatcacgaaacaatgcatcaactaataatttatgaaatcctttaattccatggtcaaaactcagtctcacaattgcctaatttatgaaatcctttaattccatggtcaaaacgtagtctcacaattgctgatgttattcaagaagtgatcccactcggcacagtccacgtaatagcagagaaagacattactcaacattgtaatagctaacaataatcaagcaaaagaactcgcgcatacatatgcggtggcatgtacggtggtatgcttatcgatgagctaaagtaagaaaatgttcacgataaaattaaatacataccacctaaacctcgtgatgtagaaactgcaaccacctgaaactcatactaatttttacctatctaattccagcagtaatgtgcaagaaaatttgaaaacttattcagcatgaaggcttaacatacattggataaactaatcaatgtataaatgtcataaatgagctaaaactattgcagaaatgctgctgagataacatgaacagcctcttaaatccaatgttgagacatgttttttttcttctggttttcagttgtactcgcttttcagttggagactaattagaattttaactgatcccaaactaaactaaacatatcagttttgtcatcgtttatggcttcaccaaaataatgctattttgttctgcaatagattaacaagcaccaaggaaccagaaacacgcaatataaatgatcaaagccagagaaaaccattgaaatgcaaactagtacaaaataaaggtgcaaagtcatgtcccctatttaatatattgctatatcactacgcatagagcttatgtaatttatcccgggttgtggagatgcttggggccctcttctcaggccccctaccccctcttatataggatgagggggagggtttacaaggaaaatatctagttgattgcaactagatctccttattctatttataaaagatatgcatgatccttgggatttatatcttatcctgggaatatctcttacttaatttacaagtagcctagggctcttggcccaccctatgccacgtggcccaagggcctctccttggttacccgggtaccgtgtaccccacaaatttagaatatgatttttttttactagtgcgagaaatttcatcctgctagctattgctgcaacttattgaaatctttgtgttcttttttagtgttagaaagtatgacgtaatttgttgccttcatttgcaagaaaatcaaacaaaacaaatcaggtgcatttagatgctattgtccatttttcttaatattgtatgaaatccattgcatttgtaaaaactgaaattcgaattattgaataaccaaagattcaatttaaatacatgagtgcgttgtgattcatgatccataccttttgatgcttctagattccagttcagaaagccgagacaaggcatacttcatgaaacccaatacgcttccattcgatgtgattgtaaccctgtaactatgttagcaaactgttctattgcctaccaagtaccaactcgtatggtattgtcacaattttctttaaattcattcttttcaccctctcctggaaaccattggttatatgatgaatgatattgcatgatatattaaatgtgtctatatgatatatgtattgaattctcccgtttcctttttcatttatcttatacaaaggcataaatgtcatgcagttcccaatgtcgaggtccttgagcatgtttcatctattcttaaggattttgggttttgcctcactagagaaggcattgatgcgagaaacctgtattgctctttttttttgcaatgattctgcatttagttttcttgatcatgtattattctttctcttattcttgaagccgtccctatgactgcaattttacaaaacatctgatagagagttacatgataaaggtttgtgttacttatttctacctttactttttgttacttttgtgaagcgatttggtatgtgggcggcttttcacataaacagttcccagtggctctataagaaagtcattaagttaagagaattatatattatatatttacaatccatgtggatcaaattccaaaattatataaatggatagaagaaaaaaaggtaaattacatatatcgacaagggcattttgctagtattaaaaagaaagatgctagaagtatgctttctcattgaaaacatttatatttacgtcatcctttttcactttcttggtgcttgtgggaaagatgtttctgccatgctctgtctgatttatcatcttgatatgttagcaagaaaaaagcaagcagcaagtaattgtcaaacaacaaggcccttcggtactgctgcattcatgggcaatggatattctcgtaatccaaatcataatcttttgttggaaagagtttggaaaccaacaagtaatcatcaatcaagtaggctctttggtactgtcacaccccgaagttctcctcccaagcctaaatttaatttataaatgaccctaagaaaataccggtgcaaagcaagagtaaaccccttttaaatcaatgcaagtaataatcggaatgggaatgtggaatttttcttgagttctacatgtcgaaattcactaacagaatttttagtgaaattttcagagccctagaaataattttaaccaattaaaattgagcaagcaatattttaattccagggaaaatcctttttttcctttttctttttctttttccctccctttttcgaatgggccgctggcccattctctcctttcctccccctcctccctgctgggccggccgcaggccgaggcccagccaggccgccccgccgccctcctctcccgaggtcgccgacaggtggggcccacctgtcgggtcctcccccaacctcccgtcccctccctccagccggcgccgccgcgcccatgcctccgccttctccgggccacgtcagccacgtccgcgtgtgcgccgcatctcccgcgcccactcccctctctctcgcgcccgcgcccgcgcccgagatggccgggattcgattttcgaatcccgcctctctctcctcccccactcccccacgtcggccagcgattcccgcctctcccggccacgtccggccccctctctccctatttaagctcctccgtcgccccctctcgctttttccccatttcgccgaactctcccgagcctcccatcgctcccgcgccgtgcaacctcttgccgccgccgtttccgccactccggccgccgctagccgccgctagggtcgccgccgcaccgcgccgtcgcagtcgtcgggttcgcgaggctaagctccaccccggccgccccttcctcgtcgagtttcgtcaccggaattcgcatcccctcgcgctccggtgagttcaaccgctgccgccgccttcggccatgaatgccggtcgccgtggttcatcttcccccctctaatctctctcttctccttccttagggcaccccgaagctcgtccgccggttgccgtcgtcctcccgtggcttgccgtcgccgttcgccatcgtcttcctccgcgccggccaccctcggtgaggcatccctcccctcttttccctttcctctcctcctagtgccgcgccgccgcttcaagtcgcgcgccgtcgccttcggccgccgccaccgcctcccatgccgccggtcgccgccgtcgtcggccgcgtgccgtcaccgctagccctggccggccggtcggctttgatgccgagccgagcccggcggccgcctccatcgccgcccgtccgatcggccccgagggcgatctgggccgtcggttccgtggaccggcggtggaccacccgcgtggtcctggtccacggtgaaccgccctcccccttgagtcgctgaccggtgggccccgcgtgccggcgccccttcctccctctcccgagccgctgaccggtgggccccgcatgtcggcgccgctttcccccgtgctgacgtcagccctggaaaatattgcgcaataaattatttaaggattttgttatagtaataaacacagtgaatcttctaaaattcataactaattcatccgagctccgtttcagcccattcaagtctcagtaaatcaagaaaaatgtgtagaatccattaaaaatggttttgttccctgtttcagtagtcttatagcctgtttgcaatgtttgctttgtatgtcgctagattccggttcctccgacgctccggtgtacttcgaaatagtcgccgaggttcctccagcagcagagcaaggcaagtcatgcttgtcacttgaacatgttgatcctatattgcaaatgctctattgttttctttcaaatactgcattgttttataatgtttctaggggatgtttacctattgtcatagccatgctattgttgtaccttgtccctttgtcagcttggggttataacatgattagagtttggactagggattgcttagccatgcttagttcaactagttcaatggggaagatcttattaatgtttagactgttggttctaatggttttgttggattagtgccaccgctttggtgctggttaattaaaataaatcacatggtgggctgtgggtgcatggttttgctggtcgcacccatggcagttaaggaccggttcgcgggatgccctggaagaacttatcgtacttaccacaagccagcgtgggcaacggctgggcttgtagtgtagctttcctctagccgacgcatccaggcaagggtgggcgtgatggagtttggatgggccctgcgacggcctatgcggcttccggattcacctaggcacgagaggggactgcccgctgccttgcgaggagtgggggtgaaacctgaggtgtggtgtgcttggttagagggggttatgcgaaaggtcctgtcatggcctctttccggtatgtcgtggtggcatgtcggcgcacggaaacgtgtcgtggggctgtgtcttgtgggtacagttgtacacctctgatcagagtaaaactattcgaatagtcgtgcccgcggttatgggcggtcaaccagattcaccgtgattagtctcaccctagtgtaatcttttgaatttggatagtttgggtggatggttgggcctgttgcaacgtgggatggcgttggacagtggatagtcaatactaattaattattacaactgtttaaatctttcaacttctgtttataaatgctcgttttatgcaaatgaaccactctagctcttctttgataattccctgcatcatacccctattccggtatgacttgctgagtacagtgggtagtactcagtcttgctctatttttcccaaccccagagcacgagtatgtgtcagatgaaggtttctccgaggagtaggcttcgtccgtgccgtcgaggatgcctgtggagtggtgttcccgctacagttctagtcaaggcttagctcctgttgtctttcgtttttccgctgcatttatgtaagacttttatgatgtttgtaagacgtggatctgaatgtcaacattgtcgtttgtgtaccccggccggtcctggacggggattttaatgcacattctgcttgaattctattcaggaatttctgggcgtgacaggtaccgaacgaattgaggtcgacattgcccatcgaacagcagtacacgacgcaagtttaagtagacatctgtcgacccaatttgtcattacgacttcagaaaatgtgactcttcttttgaccatccaacaagatattacttccaaacaaaaacatgctcatgacaaatacagttatttttgcacaagtcggaacaattgcttcaggtacaaccttttcaagaagaaccaaaacttgtaatcacatcattttttgcattcaacaagtcaaataattttgaggttccaagaacagtggtcaaaacagtaaagaatcaaaatacttacaactcacaactcaaactgcgccattatgctacaaatatatactactagtaggcttcctctaaaactgctgcactttctaaattcagaccaactacttacaacaaaaacaccacggccatctaactaccaacgtgagtgggctagcacacccctttacgacaaagcattgagccattgacaccatgaccatcacaatcagatgcaaagatgatacggctaatgagtttggctcgaatcatcatccccaccagaaagcaaccagcgcaggtactcagttccattgtccaacgacgaagcgtcgccgtgcatggtcaccctcttgcgcgtaagagtttcgacagtcacagctttcctcttccgtccacctctcggacacgagagtaactgctcgtccatctccgtgaagtttgcctggatgtggttaaagcttgtcagtttgtcactcaaatgatttgggcaagcacaagacgcgcgcagaagagctaaagatcggttagcaaaactcacctgagtgtatacatgagcgctggatttctcatggttgtccctgacatgcttgtatggaaacaccttttcacaccccgtgaatcgacatgcgaaaggttttacttgatcatgggacgcctttatatgtttggttaaatttgatttctgcaataggagggacaggtaacaagtttcaatccacaccagatacgactaaagctacagttcaagaggaagacaacaaacaatgcatcagaacatttggggataatagacttacattggaaaaagagcattcacagccctcaaaactgcattttatcctttcagtagatggcacctcctcatgggctcgtaggtgccttttaatgttcttcttcaggtgtttttccccacagatatcacactgaacatattgatggcaagcctgattatgagccctcaaacattcaacatttgtgaatgtcttcatgcagcctggttcacagcagactacttccacgtagtccaatttcactgccagaacagcacaaattaatttaattctggggataccattagcatgattaattatataatgcatggattgagctgcagttttttagttctgaaatttacaaggcagcgcctgatctactataagtaactgaggagataccatgtgattcttcatgtttcttcatctttgaagcatacttgaaaaccttgttacagccctcctccttgcaaacaaactgccggttgcttttagtagcagtttcatcctcatggatttcctttacatgcctttgcatatttgcctttatactgaacttcctaccacaaccatccatagagcaggtaaacaacttcccttgatgcttaagcatatgacggttcaagtgatctttcctaatgtagctgaaagggcagtcttcaagtgggcaaatgaacgatctctacagtcaagaagggaacgagtcaaaactgaagctgctgtaagcttacacatttctttcatacttataaattatctaaaataaattatctagtaaactggttaacggaatatgcaacgaatacctaaatgttcagtgttttccattaagatgatagagataaaagggagtataatcaccatagcgagctgagaaccaatgatgaatagtcctagctttctgaggtgacattttgatgttggatcctctcacctcttctcaaagctcccaaaaggagatccaaagaaatagtaggatgaatgaaggatatttgctaaccttattctccaaaggatccataacctattctattcaatgcctactccctccgtttcaggttataagaagttttgactttagtcaaagtcagactacttcaagtttgaataattttataggcaaatatagtaatatttataataccaaattagtttcattaaatcaataatttaatatattttcataataaatttgtcttgggttgaaaatgttattatttttttctacaaactaagtcaaacctaaagcagtttgactttgaccaaagtcaaaacatcttataacctgaaatagaagtagtactatttatcagcaaaaagttgtgcacaggtgtttatcagctaaaacaattcatatataatttgcaacggaacatattgtagttttgtatatgatggagatatcaacaccatagcgagctaaatgaacctattacagaaggccctagctttctgagatggtattttgatcttggatcccctctttgttccaactaaggacctccaaaaccaggttccagaagcccaaagagagtgagagagaacattagaacaaaggagaagataacctcccaaattcactgcatggatccatttcacaagatttgcaatatcaaaaaaatgtaaaatagccagcaactagtcaataattaagcagtaatcagttttcaccatttatgcatgctgtaaaaaaacactatttatgtatatgtatgctgtaaaaaaccttgttactaataaaaattaaagatatcatgtatagcataccacaaggcaaattgataaacaatgaattccagcacatgtgcatacaacaaaggagacattagtacttaattggaaacaaggagatgcaggctatcccatgaagttgaataataatcaaaatagtaaaaaagaaaagaactaatacaagcaaggacaaacctcctgaaagagcgtgaggaggcaatcctgttggagcttcacaggtggtcatcccaacctgttactagtccagacaagattaaatatgcctcatcgcattttggagttctttgggatccaatgcttcacacagttaagaatctatatcctgcaaaacacttgtttttagcaaattgaagtagataagaacaatttctttgacaaccagatcagcggacggagaaaaaccatacaagaatgttatgtttaaatgtttccaaaaaaactaatcccagcaccattccaacaaaaaagcaatatcatgttgtatgcacatatgagaaatgccaacctcatcagagtgactttgcatatgctgcttcagatgagctggcttctggaaagaagcaccacactcttggcaggtgtggtcaccttcatgaacaaccttttccccatttgacttgtagatttccgatttgtccagttcttcctatagataaatttgaagtgagggcatcagatattcatataatgattcaaatggataagagcagaaggaattgacaaaagcacaaatatattgattgatggacctaaactccaatcagagaaccataacggtcaaataactcaatttaattaatacagtccacattgtctttaaaacataaggcataatatggcccatattcctaaaatatctaagtagttttataccttatgatgagcaaccatgtgagctcggatgagacattttttggacctaacaaccgtgcaaaattcacacttgtagcgccttatatccctgtgttgtgttgcttcaaccctcatgtctccatcaatatcatctccagagcacatctaatagtaggcaaatcagatagttagaaattcggcacacataaataagtcatttatatataaaaaaaagtaaacaagtaaaacattcagaggtagcgatgtagtcagcaagatagctgtaaaatgaggagaagtccataacatgaactgggacgcattgcagtctttactctttttttgacagagtgaccaaacaaaatacaggtatagcatatctgcaggtcgacatctaaaataaatctctacaattctgcattttcaatgaaataacatcagtgtgttacaactggctatcactaattggttaatcaaacaaatcaaaacaaaactatggtgccttgtcactaacaaaaagaaaaaaatatcagcatatcatcctcagttcggttagaggtcatcaaaggaaagaaaaaaaaaggacaatatgtgtttctagagcatgtgttctccatcagttaacactaatggagatggtatgggatccatcttgagatgcctagccatgatttccaaggtgacataaatttcccttctagcatcatgtgtcttgtcctctaccaaaaattcatggacgacaccatcaacttcaatccaactgcaacccggttttttgtatattttcctactcaacatctgcttcctcatatccaaagcttctttccatctgtttgataaggcatacatgttccaaagaagcacataaaccccatcatccccaggttctctctttataatttccattccagcaatctcagctaatctatcattgccatgagctaggcatgcactaagaagtgacctccaaataacaatatcaggctcgacatccatatgatctatcagagcttctgcttcttctagaagtccaccccgtcctaacagatcaaccatgcatccatagtgctcaagccggggatcaatatggtagacttcacgcattttatcaaataactctctgccttcttgtattaacccagcatggctgcatgctgacaaaactgagacgaatgtcacactgtttggaagtatcccagaccttagcatatcccaaaagagctcaacagctttcctcccattaccctggacagtgaaacttgaaatcatagttgtccatgtgaatgcgtccttcatctgaacttcttcaaatacagaaaatgcactagcaatgcttccactctttgcatacatatccatcagagcatttgtaacaattatattggtggtggcattagatttgcttccatatccatgaatggcacgtccaagatccaaagcaccaatatcagcacaagctgatagcacccctacaattgtaatatggttaggacggtggccctccaaaagcatcttaccaaatagctcaagagcttggataggctgcttgtcttgaacatgaccagtgatcagtgctgtccaagaaacagtgctcttcataggcatctgataaaagaatgacaaagctgaatccacaccaacacacttcatgtaaccatacagcatgctaccccaagtgacctcatcttttacaagcattctatcaaatacagtccgtgcaggctcaaacttgccacatcgacaatacatatcaaccaaagcattacaaacgaccaactcagagtccaatccacaccgaaaaatcaggccatgcaccacgctaccaatacgctgatcccctaatccaccagaggccgagagggcaccgacagcagcaaagccatcagggcggtggccagaagcaatggcgtgagagaacacggatatagctttccagtggtgatctaacttgagatgaagggacatgaggctggtgaaggagataatgtcagggtgggggatttcatcaaacaacctgcctgcgtcagccggtcggccaaactcggcataggaccggaagattttgcaggagatggactgctggttggggtggaggccgtgtgtgagggcctgggcgtggattctttggagctctcttatggttttgcactgggtgagaaggtggtggcaaacgcttctattcatcccccctctcctcaacgcaagaagctctcccgaacagcacaacctggaattagagctaaaattactaggaaaaaaagctacaattaactcatacgacatccacactgcttagactattaacaatttcgtgctgtttcaacgaacactgaccacaagcccagaatctaaacgcacagatcaggatcgatttggttaatactatctcatgcttttaactgctcaaatcgaaagcgaagaattaccaacgcgataaccaaatcgaagaaacatattcctaactcctaagtaggcatcggttttgggcatggtggttgtgtttgcaagcgaggattggatgcccaccttggaatctttgatgcgtttggactggaggagatcttggctgcgacgaggtgtgatttcccgcgcttctccgtgaggaggatggagcggcggcggcggcggcggggagtgaggactggggctcttggttcctcctcgccttcataagcggtcgcgccgaaaccctagagcctgggtgggtgggctttttcgcaggccgaaaatgggccgagcaatttttaagttgggcctgtactgatgggctgacattgctggcccactcgtgacgctcttctcctctggctcgatgacaggtggcccccacacgcggacacgcctcctccttgttgctttccgccggcgatgccattctcgccggagttcgcacgacggcgaggcggcggcgtgcgcacaggcagcggtgaggaaacctctatctccctatctatctatcgccgccgtgcgtttcggctcctgtttgttactgccattgttgatgtttacagtagcttggtggatctagctctagtagttagggatggaaagcaacaagggacactcaaaatgcagccttaaaatttcctctccggcgttgggtagtgttgggatccagcagtggcatggctatggtgcagtagaccttggtgatttgtgttgtacttgtcatagcttcctgtaggactagggttatcatggttgaatctgtagagaacccagaaatttacagggttgatagatgcaacctaccacctggggtgtgatgtggattgtagaaacttccaattacctcgccatttccaccagttatatcaagaacccaagtatcacggtgcctgtcaagttagacaatcttggtatattagaacatagtggttcagatatgtgatgccagcaccattggcattgtaaaaggctatgaagagggccaacacatcagcgatgatgatttacttattctttacctggttatgcatagtgactgctgttatttccttatgtgcggaaccatgattctgagccaccggggttctataatactgttgtctttgttggttcttctttttttttaagctatgtattttaagctccaaaagtttggagttagggccatgagttcttgtttcagtgagctctcttcatttgaactaaaataaatgtttaactcacttttatttcagacgataaactctatattttgcactaattcaagagttggggggcttggagctatgtaacaaaacttaattctttcaaccacacaagcaagttttcaaattgtcaaagttatttgcgaacttaaaaaaagcttgacatctagtagttgattagaataacggtagcctaatgcatacatagacccactacatagctatataattagctaattggttaactgaccaaatatatatgttaagctgtggtattggtggtggactgactacgccaaagcccctagcaactactgggaaacgggcttactatttctgataccaattgaattatgtaattaattttcaaataaatgaactatgctcgtaagttgctgcagttcaacacgctggggctagtaagctttggctgctagggtcactgcatatagaatactggtgaacacactaggtcggctggagggcatcgaggtcatctgaccccggtgatactactgtagatctgcccctcttgtactcgtagtgaaacaagctatttgtgttcatctattcaccacttgatgcttgcataggcaactatacatgtttggaactttgatgatggtgctctgctagcagatgaaaggcctcttgaacacattgaattgttgtagcctcggtgttcatatcttgaggaagaagaggctcagcatggcttgctgggatgttcaacgatgccgccatctcagacatgaatacgggattcatattaatgatgactggtagcgccttgccaccaccaactgcacggtgatcttctccgtctatgatggaattggttccccttcaaatgcatgctctgtcaatgaactctctatcagatcactcgctgactccaagctttttcccctttgcagttgtgcccttatcatctctcttgtagatcaccctggtaacgtgttcaagaaattgatctttagtctgaaattggacaagaatgatgaggtttgtagggatgaagaagctacatgtttggtgtgtgcgctattggtcaagaatcagaaccagtcacttttgtaacaggtaatttatggacattgcaaggtggatggtagagttttttcagtttcactctatttcttctttactactatttttagttccacaacactcatttccttttctttgcgtgagctcattgctctttatttggttcatggtactattaataaacatctgcatgtgcatgttatagattaaacactgaaaaaataaaacattgacaaaattaagaccagacaaataaactatatttggaaagaattggctggtaactgactgcctagctctctataaaaggcctccccaagtcccttcttccattgctgccagcattttgattctgtgtgtgtgtcttggttgcaaaaaccaagacatacacacagaatcaaataataacaaaggtttcctagcctcaaaggatacatatatatagtttccctacaatacaatggagcctgtcaatgatttccaggaaggcatttcaacagagcatgcctttgaggcagagcctgtgccatcattgtcggaaacaataacgccacgatcaatggtggtgagcttcatccttagtgtaactctcagcatcgtcgccatgaaggtcaccttgagctctggcttcattccgtcgttcagcatcccagccggcctcctcggtttttgtgtatcccgtgcgtcgatccgcattcttgactacttcgcagtggcacaactaccattcacacgccaagagaacaccatcatccagacctgtgtcgtcgcatgcacctcgatcacattcaccggtatatagacaatctgaaaatagtagttgatagaattgtgtgcactattttatgtttatctttactataaccgtacttccttacataggtggctttgggacatatattcttgcaatgggaaagaaagcagctgtaggggatgtcaatgcccaaaataacgttgaggagccaagctttgccaggatgatcaccttcctcttccttatcagctttgctggcatgttcatcatcatgcccttcaggaaggtcatgatcattaggcaccggttgacattccccagcggcacagcaacggcgcacctcatcaatagcttccatacacctcaaggtgtcaagcaagcaaggtatcatcaattaaactttacatggaaatgtttctgttggatcaagtactattcgaagccttagattacacaatcaaattgactatttgtgtttgcaggaagcaagtgacattattgtttaaatcgtttggaggaaccatcgcatggtcgctcttccagtggttcttcgcctctgggccgggctgtggcttcaaattcttccccacatttggcctcgaggcatataaacacgggtacgcaatcagacatgcatggatggaattcatcagctagcgtagtggttgattgggaaactaattttgttcccttttatcagattcttcttcgatttcaccatggccaatgtcggcattggcatgatgtgcccgtacatgatcgtgttctccgttttcattggcaccatcatctcgtgcggtgtaatttggccgtacatcgagtcaaaggagggcatctggtacccaagcaaccttgggcccaacagccttaacggcatcagaggttacaaggtgttcatcggcttgtccatgataatggctgactgcctcttcgtcttcctctgcatcatggtccggacaacatgtgccatgatcaagcggcgtcggcaggcaatgcaaggtggtggcggtaatgcgcagccattccagggtatcgacatcgccgatcagccggtgaagagcttcgatgatcgccgcagggcgcaggtgttcctccgggacgagataccggactcggtcaccattggctgctatgtcctcctgtcgatcatctccatcgccgccatccctcacctctacccacagatgaggtacagccatgttgcgctcatctacctcgccgcgcccgtcttcgccttctgcaacgcctacggcttcggcgtcaccgacatgaacctggctagcacctattgcaagatcgccatgttcgcgttcggctcgtgggtcggcatcaagagcggcggcgtggtcgccgccctggtcgccggcgggatcaccatgtcgatcctgggcaacgcggccgacgtcgcgcaggacctcaagacgggctacctgacgctgacgtcgccgcgcgccgtgttcatcagcgaggcgatcggcacggcgctgggatgcgtcgtcaaccccaccgtgttctgggtgttctacagggtgtacaagatgggcagcggcgacatgggcgacatgccctacgccaagctctaccgcggcttcgccatgctcagcgtcggcgacggcgagcaaggcctgcccaggcacagcatgctcctcttcaaggtcttcttcgtgctcgccctggcgctcagcgtgttccgggaggtggcgagccggaaggagtggcgcatccggcgctacatcccgagcaccatcggcatggccatcaccttcttcatgccgccgcgcgtgcccgtcggcatgtgcatcggcagcctggtggcgtacctgtgggagaagatggacgccggccgcgggcggatgctctcgccggcgctggcgtcggggctcatctgcggcgacggcgtcggctcgatcttgctgtccatgctgacactcatgggtgccagggcgcccatctgcatcaagttcttgtctcgaggtgacaatgtcaagttggacgccttcttggcaacactccatgacatgagatagctactagctagctatccatgtagggaaactagatcattttctcaggtgtcaaaacttttgtacatatgtatccacgtcataggggcttgagttaggagtcgtggcaaactgtataatcaagtttcagttcagtctataaacacagtttgatctcctctatcaacagttgcctcactgagtccatggttcaatatgagaatgcgtgcactgattttggcagaacccagaagtttgctttgataaactggagtccacatagattactagtactgtaactgttaaataaacctgataaaatgttaatttctagctacagtacaggaacattgcagagagtttcacaactgaccagtcagtcagacagacaacgaatatgcaagcacgcatgctacccatcttttttacatggacagacatcaaacgccttatttatacatttaattgtatcaagaaacaaatgaatgaatttaagggcatgtttagatcaatttgctgtggcagaattttttggcaaaagtttttgtggcaaaaattttggtattgaagttttgctagttggtgtttagatgcatgtgtcattttactagtaaagagagagagcacggctcccaacgcactatttagcaaaatttgctactctagactcccaaatgacaaatgccaaattaccaacttttgctaccagtatttagatccattttgaccaaaagtgcttctaaaacagaaaacttttgctattttggaggatctaaacagggcctaagaatcaaaggagggaaaacacttttaatcacttgagtggttgttcactcattcattgcatgtcaattcattagttataaaaaacttcaaaaatattgaaaaaatagattattagtatgattttttttctaatcaaactttattaagtttgaccaagtttatagaaaaaattagtagacatctaaaatattaaattagttttattaaatctaacattgaatatattttaacaatatatttgttttgtgttgaaaatagtactatattttttatatataacttgatcaaactcaaagaagtttgactagaaaaaaaatgacttataatgtaaaacggagagagtatgtaacatatcactccacaaattcaaattcgactatttatattgtaaaaaaaattaaaattgactttgaatatgctatttacatattaatctatcttgtcattcttttaaaaagattataacaatttatttgacatgcaataaacgagtgaagtcagtgtcccacttccatttgccattgcagttggtctcacaattgatcatgaatatgcaaagcacgcatgctatcaatcttttacatggacatatatccatccaaggccttaatttgtacatgtgaagtataacaaatgaatttaagaaccaatcagtaaagagagagagagagagtacatatgtatgctacaccagctgcttctcttctacacttacattacaaggctaatatatataaaccaatcgacaattaattaattaagtataatcactaaagaactaattaatcaacctacacgtacgcgtggcaagatcgatggaaggctagcttgagcttgaagtggatggatggatcatggcggcgtgggcagcgtcctgaggaagagctggaccttgtcgttggtggcggtggagaagacgcgcatgcacatgggcgggttgacgttggcgagcgagaggatggaggagggcagcgaccagatgccgtcgccgcagatgaggccggaggcgacggcgggggcgaaggtgtgggcgcggacggggtcgctgcgggaccagaggaagaggacgaggctgccgacgcacatgtcgatggtgaagaaggagccgaggaagaaagggacggccatgccgagggcgctggggatgaagtcctggatccaccacccgcgctgcttggccacctccttgagggcgcagatggcgatggcgaggaggaagaaggcgaggcagaagcggaggcagtagcgggggagctggtcccacccgttcacgcccaggagggcgatcccccggtagatcttggcgtacggcgccgggaacccttcctccatcccgatgttgttcgccttgtagaacatccagaacaccatcgggcttattatgcatcccatccccgtccccagcacctaatcatcatcacacaccttaaacttaaaacaagtattggttggtgcatgcaacttaatgtacaggatacgataaaattcgttcgttgcaacgcatgatagtacttacataaaacttattatgatacaacttaaaattgattagtacatgcagcacaatatattgtacatgatacaataaagttcgtatttgacaatgcatgatacacacttacatgaaaattatttgctacagctaggtgcaattacacctaaatgtgtacacatgcggtttaaatgtttatataaaaaggtcatagaatttgacaagatatattatgatagtataagacaccacaaaaacatacatgtcttgattcggtctacacataaaaaacaaaaataacaaaatttacctgcattgtataagtactattcattatctgatttcgttagttgtaaattaaatttagtcttgcatgtttatttatacacttacattattgcacttgatattactattcttttaagaaaatctatagtaattttaagtcgcaaacaaataacgggtgccatataggagtagaattaaaattttgtccggtagtacttacctggctgacgaacatggagcggggtgaggtgagcgtgaggtatccggtcttgaagtcctggacgaggtcggaggcggtggagacgatgcccatcatgaggccgcaggcggcgaggcccgcgacgacgccgccgtccttggcgccgatgttcgcgccgaagatgaagatggcgagcttgccgtagctgctggagagggaccaatcggtgaggcccgtgccgtaggcgttgcagaaggcgaagagcggcgccaccacgtacgcccacaccacgtgcttgggccgcagctgccggaagatgtgcgggatggcgaccaccgagatggcggcgaggagcacgtacgccgccgcggcgatcgtcgtcgggatctggtccttgaggaacacctgcgtccgcctccggtcgtcgaagctgagcacctgccgctccgtccccgtggcgccggcgaacggcgtctcctgcggctgcttgctggcgccgccgcggcgcttcaggtagaggtcgtaggcggtgcggagcacgatggagaagaagttgaagagcccgtctccgacgatcatggcgatggagatgaacacctggtacccgttcagcccatggaggctgctcttgggtaaccccgcgtcgtaccagctccccttcttgctctcgatgtacggccacatgatcccccacgacaccacggagccgatgagcagcgagaagttgataatgtaggggcagatcatgccgacgccgacgtaggtcgccgagaaatcgaagtagaatcggcggctgtacgccaccatcccgaacgtcgggaacgagctgaacccgcacccggggccggcggcgtagaaccactggaacagcgaccagaggaagctcccgacgaacgacttgaagaggatggacacctggtgcttcgcctggatcgcgccctgcggcgtgtggaagctgttgatgaggtgcgcggtggcggagccgctgggataggtgagcttgtagctgataatcatgatcttgcggagcggcacgatggagaagaggccgacgaagctgacgaggaagaggaaggcgatgaggcggcccagcgacggctcctcgacgttgatgctggtcttggcctccgcctcgtcgaagccctcggcgatcttcttgctcatgccgaggatgtaggtgccgaatccgccggagaaggcgatgctggagcaggagatgacgcaggtctggacgacggtgttctcctgccgggtgaacggcttggggaacacgccgcaccgctcgagcgcgctggtccacgtcttcatgaggaagaaggcgaggagccccgcggagacgttgagggaggggacgatgcccgaggtgaggttgagcttcatgacgatgaagctgaggaacgtgcccagcaccgcgctcaccaccagcgacctcaccgtgatctgctccgaccacgccggcagcgccttcccctcgaacgccttctccgtcgacaccgatatcacctcccgcgtcacctccgcctccccttccccagccgccgccgccatcatcttgattgattgattggttggttggttgattgattgagtcctcgacgacgatggcggcggcggcggcggcgagggctagcttcttccctgggtcgatctctgtccggccccggagacccggagatgggggagatgacgcaaacttgtgtgattagtggctgtgagtaattaaagtgtctacttttttgaaaaaattgttaattactcaactatactagagtaatgccaaaaaatgattgattaaaatggccatcagtagtaatgatgttttgttattctgttgtttcttcttctttcattcattttttccttttttaaaaaaaataacttggaattttttcttgcggtcatgatgtggggtgagtagtggacggttgtcatgcaacatgcaatctcgtgccatttgcagacggctaatttgggccagctaattttggcagtgtgatactttggaattagagttactctgattttcaatcaagtactagagttaaaaaaatagaataaaatatttaatatcaattggtgtcgtggtatagtaggttattacgtcagtctaaggtctcttttcttcaacttcaaacttcaacttcttgttttccgttaacacgttttttaaaactgttaaattttttgtgctacggcgattgaaagaatgtcaaccaaagtagaggaaagatcaagatggacgtttctaaatcggtcgataaaattagtaataagaagtctttaaaaagtgcgcattcatcatagaaaacgaggatgtaatagggttgctgatgaacttactcaacttgctaaacggaccgcatattgcgcggtttggcgtgaccatgcttcgtcttgtgtgatgcaggctctgaagtaagattgtaatattattacataatcaataaagcactcatttccctcaaaaaaattgtttgtgttttggcaaaagaaatctatatataaattgtttaaaaaattcaagtaaatctatttttcaagtttataattattaatatttaattaattacgtgctaatgaactttctcattttacgtagctaaaaacctcactccaagttgagagaaagaacgcagcctaatgcacttaaggtctcctgttcgagtctgggtaacaccatttttactgatgttcttttattttgtttttctttgccaaatcttaaattagcaaagtccactaaatttagtttgcatttcttttcatttttttaacagccaaacattttttcctattttttcttgtagcgaagtccactaaatttaatctacatttttttcttttattttttaacagccaaatccactagattttaatatgcttcgtcatggaccacgaaattaaattagtaaagtccactaaatttaatttgtattttttttctttttttttaacagccaaatatgctccatcatggaccactaaatttaatgttcagtcctatgtacagtaccatccattgttttcgttttttaaggctctaatccattgctttctttcttgttcactctgaacgagactggccaaagaaatcaattgagcagtggctagtggtgtactggtggtcattgtcatttgtttttcaccttaacaaaagatgaactacaaaaagcttttctacaaatccacatgtatcactgctctctcgtcccataaaaaactaatttaaaataagaaatgacatttttcagttaataaatctagatacgaacatattcagatgaaatacttgtaaataaaaaggaaaaaaaaggaaggaatttgaaaggaatcatattgcggtgatagaggagagacaaaagtgcacagctaagctgttttagtttagtagtgcagcagttgcagatctcccctcatctccagcttctcctcgtcgccggagctcgagatggccggcggtgacctgcgccagcgccgggcggtggcggcggctgacggggagggggacggcaagatggggtcagggggagaggaggcggaggtgaaggggaaggggcaggggaggaaggaggcgctggggtggctggagtgggggcgggggtggatgggaatcgtgggggagttcctcttccagcgcatcgccgccagcaacctctccaacccgctcgagcttcccccgctcgacggcgtctccttcgtcgtcaccggcgccaccagcggcatcggcctcgagatcgccaggtccaatctcttatcccttctacttcttctacttctactgctgctcttgccttgcccttagagatgatgggtggttcaattcgggcatgcgaagattctctggatggatgccatcaactcaagatttatcgatagcctttttggtttctgaattccaaataattcgtagtgttctcgacaatatagtgtgtgtaatgtgggcacccactggtacgaggtttagctcttcttttcttctcctgactttaaatgtcatgtcagtttatccaagcctcgctggttggtttgtagtaggcagatacggtagagttagtgaagttcttatttttactatttgatgaatcgttttgggatggcaatactatggtgaaaatagatttatatgtgctaacctgaaatttttggggcttttaactatttgccacttttagatttggcaagtaactatttgccacccctatatcaatgacatgtgggtcctggcaaaaagttaattgccacatctaaatgtggcaaatggttaaatatctcgaaatttttcgaaacaaaataataggggtactctcatacatgttacagtaatgaattggtccttgactgcacttcatcttgttacttcacaagtaaaactgtcaaaaatattcatctggcttcatcaatttggggagcatctttgataggtttccaatcaagaaacatgaaatctatcaagctaatttgccagatatcactttttattcagcgatatttcttattgggaagctgagtcatattattggttcctatataattgtatatgtgaattttgtaaagacttttgtttggttcaatagatttggtgttacatcttctaatgtagaaaagtattacaaatttgaaaatgcctaatcttcttataaatttcacatctctggaactaatacaagtgtatatttgcccttgtgctctggaacaaaatactaggggtactcatacatgttactgaattggtccttgactgcagttcatcttgttacttcataagtaaaactgtcaaaagtcttcatttggcttcctctatttggagagtgccttgataggattccaatcaataaacatgaaatctatcaggctaatttgccagacctcactttttagtcaacggcatttcttatcggagctgagtcatatcgttggttcttatgtaattgtatctgtaaaatttgtaaagacttatgttcggttcaatagatttggtgttgcatcttctaatgtcgaaaagtattacaaatttgaaaacgtgtaaacttcttataaatctcacatctttccctataactaatataagtgtatatttgcccttgtggtcaattcagacaacttgcactggcaggaggtcatgttgtgatggctgttaggagaaccaaattggcgcaggagctcattcagaaatggcagaatgataattcagagataggaaagccccttaatgctgaggtaatcatgaagacactatctacaggctgtacacaattgttgtctcatggcattttactagtttgtcttgtttaacacacataaatttgaatttctggccttatatgctcaaatcgaattccaactttcaagtaaatactatagtgtgtccttcacatctagcttttctaatcaattggaagatatctgttgcgaatgcatatcttaattggtaaagacaaagacatgtttctccaacatttatgtggtttagctgcagatcatttgacaattttttaatatattactctttaaggtgatggagcttgacctactctctctagattcagttgtaaaatttgccgatgcctggaatgctcgtatggcacccctacacgtattgatcaacaacgctggcattttctctataggaggtctgtatgcttcgacgataatctgtttcttttgtttttggtctatcaaatcaatccaacttgcattttactcggtaaagaattcaaattgtaccagacataactaactctttcattttctgtagaaccccagcgtttctcaaaggatgggtatgaagaacacatgcaagtgaaccatcttgcaccggctttattggcagtgttgcttctaccttcccttcttcgtggttctcctagcagaattgtaaacgttaattcagttgtgagtctctactcttacctgtgctgtgactgcctacttaggaattgttggaaagtgaccacggtttccttatcatgtataaaattggttattaatcctaacctcaatattttgaaaaacttgtctgaattcattattttaatgacaattaagaatcatttctgtgtaaaatttacaaatacctccagatacacttctgccatctaacaagcttgtctgcaatttcagatgcacacagtaggttttgtagatgctgaagatatgaacttgacatctggaaaacggaaatttacaagtttgatgggatactcaaatagcaagttagcacaggtatcacagaggtgttagattgctaattagcagttgttccctttgcaacgttaatttccttattgtactttgtattgttttcattctgctttattgcaagggaacaatcagtatctaaactgtccatgcacttttttcatgctatgtaggtctgatttattcttgtttcacttgcagataaaatttagcagcatgcttcacaggaggattccggcagaggctgaaattaatgttatttgtgcctctcctgggattgttcatacaaatgttgtgagttccgtttccccctgtccaatgtttgccctgtgaaacatgctatttcataggaattaaagaaccagaagtttgtggtattagttttgcatatgcctctagccagaccaacccctttcgggtgttaccataaagagaaaagaaacacatgcactattggggaaaaaatggaagccaaagaattttgtagtaacttaatgcaaggacagttgaaaagaaataccacaacctaaggctacatattttccgagaggattagtcatgtctatttttagttcaactcagcaaagaatctctcttgagcatcctaatgaacctctattaatctgtgctctgaataaacctggccaaatggaccgtgccaagccgggccggcccgagcacggcagtactgtagccggcccaggcccggcacggcacgccagcctgtgggccgtgccggcacggcccgttatcccgtgccgtgtttgggccgatgcctcagcccgtgggctggcacggcacggcacgtttactgtagcgtaccggcacggcacggcccaggcatggcacggcccaccggcccatttattttcctacgattttctaatttttcccatatatttctcatattttttatttttttccacattttatcctatttgtaccatatattttatgatatatttcctaaattttcctcacatttatcctatatttatcattttttcctttatattatgttttttctgccttttttctttttttcccctcaaatttcaatttttatgggccacatgtactagtgggccggctaccagcccacgtgccactacagtagccgtgccggcccggcacggcccagcaccttcttgggccgtgcttgggccgtggccttggcacgtgggccggcacggcacggcccgctataggagccgtgcctaacgggccgtgccctagtgggccgtgccgtcggcgtgccgtgtcgtgctgggccgggccgcccgtttggcctgctatagctctgaatatattggcaaacttattctcatttccttctgttagtttattatttgtatgttgatctaataatgcccataaatggtgcaggcaagggatctccccaagcttgttgtagctgcatatcatttgattccgtacttcatattcgatgctcaagaaggtgatgtacaggacctttcagacgttgctatctatcaattgacaactctccaccttctgacatgcacaatatcttgttactgatctaatgcaggttcaagaagtacactgttcgcagcttctgatccccaagttccagattactgcgagatgctcaagtctgaagactggcctgtttgtgcttgcatctcatatgactgtaatccaatgaatgcatctgaagaatcacataacctcgagacgtcgcagctagtatgggagaagacattagagatgattggcctcccaccagatgccgtggacaagttcatcgaaggggaatcggttcagtgtcgttatggacaacagaaggcagaataggctatttcgtagacagcaaatatgtgataatttcgaatgttcgatccatttcatcatgcgattagtttgccagtggttttgttccagtactttgtaatagtacatctgtcatacccttttttttgtttcatatggttggtaaatctaactgcgtcaaatagaagtatgacaaaacaaagttcgttacaatttatctttgccccttgttaaatggcaaaacgtttgtagagttttgagttgtaaaagcatagtcccttcattctttggggataatcaagatatttattattgtttgggggaattaaccgaaacattttcagtttgtagcctgttctgctgtgcctcaaaacgctgcacttacataggtgtggcaacgctgtcctgaataccaaaactgacgatacaagaaggatggataaattttcaacatcacaagcaaatactaccatatatcagctctgaatttgaggataatgtaatgaactaatttagaacatactatattgctatgcatgtgctcacatgcgaaactcttgctagaaacagaacaagtactgccaagccaatgctaaaataatagcacagtcacaacttccacacttgaacaaactcatgcgagggacatgagagtttgtggagcattcaccaggcaagagggttacgatccagattaattacaggcatcgcccctcaataggacgagttaaaaacagaactccaataaaagaacagtttaccacgtaatggacagcatcgcggactattttactctccaggaagaccgaacacattttgatctgccaatggatgaatagcagcatagctagtctgcacctaattaagcatttggtggccaaagctttggatcttgagttgtgtccacagcagttggaggcaaccactgccacattgccatcccttggaatgctgcgggcgtaggagcatttttgttgcccagagcttgataaggtggtataaatggagggaatgcagcgggatggaatgcagctggatgagggagatgaggaacaaatcctgtaggagcaacactcaatgctttaacttgctgttccagcctctccttctctgccttcagagtaactttctcatcacggagttcattcttctccacctgaaaaataatagagccataaaacatacatgtttggtcagatcaagacttctcgtagatgcatgggaggtctgaccaatgaattccggacttgccattagtgaaggtagtgaacctagtaattattatctggtgaaccaaccaacaattgcacagaaatcaaactcggcgcactttagaaaagttttctttgttgtgtctgcttgaactctgttcctgggaacagtgcatgcgatatatcattttaggacacaggacatgactgtggagggcatcaggcattctaatccaggggtagaaggtaaaaaattgtgagaacaaaataccttaaggtccttgattgtttctcgtagcttctcattagattctttaagcttttctgcctcgcctctgagttctgccaacagacgagctgcatcactcaagatatttgctttatccaacttagcttgcttgtcaggattgataacggaagataactcaaggaacctgcgattgagaaaaatagatcacagctgagacatatgtggaaaatcatgtatgcatgtgtgagtgcattcatcttttctacatggagggatggcgaagaggcacgttgttaattcccacacctgtcattcagtctatccctccgaattttctcacggcaagctttggactttggaccagatgatgatgattcatctctacctctgcacaaaatcagaaccattacaaatgaaaatcaaatatggtcccagcaataaaatgaataatatgtctaaatactgtgttaaatttgttcatggtaataccgtaatggttgaaaagttataactatcagtaacagttcaaggtatgtaagcaaagatacttagaaaatcataagaaagtaagattcagaaactagtgacagaccttttccctaaaacagattggtcaaggcaacaagtatctccactgacatcatcaatcccaagtctgcaataattacaaagtaagcgccaagtgaataacagttgatgggaacaaaaattattcaagcaaggtatagctgctcaggtaggcaacaaaagattctgccatacatatttccattagcaagtgcttcaaagctaacattttacattcagaatcatacttgtgtagatatttcagagagcaaagaacaatgtaacatatcctatggcaagtagttggcaactaggtgtttatcacgcaggcgcccacttttccaataagggcgcaatcaaattgctaattgatttcaataagctcgattggaatggtaccaacagcaccagaactactagtacacgctattgtaatttacggtttttgccctccaatcgatgggtactgtagcagcatttgctgaacccgcctataaatcagctagcaatcacaattcttcgttcatatactactataacctaatcgatcaatcaatcaaccaactagacggtgtacatgtgaaaatccccctctttttctcaagaaaaaaaatactcctaagtagtatcaaacatcaccgcaatttttttaagcaacaaacctgcagcgacaaggacagcaaacactacaaaacgcatgcaacaaaccccaattcgagctcaatttactcctcaaaaagaaacagaagcggatcaagcgtaccctccatcgcagggcagcgtcggcacaccgtcgcagaagacgccgaggtcgccgtcctcgccgccgccgccgatgaggaactcgtcaacggggtctccgcctccgtccatcgcccgcggcgggtgcgggagatcgggcctagggttcggggattctcgctcctcctccgcgagcgagaggtcggggaagaattggggatttggggatgagacttttgcagattgcaccctggatataactgtaatgtctaacgagtcctcgcttagtagtttttagctgtggtggagaggggtgatgttgtgattttatacttttttggaggggttgggtgtaaaagtgagaataggttggtggctgaggaagatgctgggaaaaaaggggagataagatgatgagcgtgtatagcacaggatgtggtcctgttcatcatgtttttttgtgttttttttatttttggatttgtgtttcatgtgatcaacttgatcagtgtcatctactggctactgcatctgttctcgatttgtttactctgattaggtttagaaaagtttgtttcatgtcaattagcctaacataaagagagtggtgtgactcgtgatttaataatataaacatagagttgactagttgagtatgcgttttgtagagttgttagcacaattcttttttgtgtgagtgtgtagaccatatacctcaagttttttttttaaaataaaacaaatgctcccaagctcgtcgtttgctctataactgataagatgtgaaaaaagattgaagtatggaaaaaattatgagtaaaatttttatatatgtataaacttagtcatttaaaagtcgatgcaaaagataactataaaactaaaactaagtttcaaaatttaaattttactcgcggctgataatcctcaagcaaatgatggcagtgttatacttcaaatttcaaggttggtgtacctggagcaatgttactgaagagaagatccaatccaagtacaaatccagccacagatgctcagcccactgggctcctttcgtatgcctgagcccatgatcccctctggtgtttcaagcctggccttataaccaatgaatgggtctcaaatgtaaactactaaagccttggccctcttggcttctcttcttcatgcacagaatcaagaacagcaaaatcttggctttgttctaaaaaaataaactcgtggctttacttttcctttattacgattacagaatagaaccaaattaaaaattacactatagagaaagagagactgttctttgtagataattattctgaccaagtaaaaacaaaagaaaggccagttttttctgcagaatatgactatccgaattccgaatatttttcactttttgtgtgaatgcataaaaacttctatatcctccttggagaatggcagcacgaataagtggagggccatatttggagaagcaagtatgatcatgtgataggtaaaaagaagatagatcagcaacttcctccttcagaaaaaagcttcaagatgttttctccacttgaggcctgtctactacatacacacactagacagatggatgctgctccacttaaggcctggcattcattcatttcattcatgcatggcattcagattcagtcattcagggccatcagaagcaacagcaagtgctgcaatttcttttctacctctcctttatgccccttccacaaagcaatggatggattccatttccattccattccattcctttttatcaccaccaacaacaaaaatagtgcatgggtttgcaaacacctggaaatgtgccatcctctagtttattgttttttgccatttgtatatatttgtgtgctagctagctagctgatccaccactacggcctcattgcatctctgatcactaccagaaggaaaaaaggtattgaaattggacattatagtgtggttcaatattatgtgtcaaactaggagtgctctgtgggaagcttaggcttcaagtgtggctatcagtaggtgctagacactctagtcacttattgggggtaaaatgatgattcttggaaggtgattaattgacatttgtgcgaactagctagctgtcatgtctgtcaatggattttatgcatcctatcttttctgaaaataagagactgtcaacttcaaggctaacaaagtggcatgtttgctcatctagtagattaacaaactggatattgctgaagacataattcgcattatctttcttgtgataggcagagaattcgttggtcctcaagtttttgtattattacatactagttacatgcccgtactttgcaacgggattgggtgatagaaatatgattaaatttccttctatgccgggttttcacgatgcattatgttttgaggtctttttggagtgtttttttaagggaaaggaatggttttttagaggaaggaagttttttttttggaggggaggaaggaggacgacgaagtagttaagagatatgggtatacattatatgtgtaaaatcctagagttacatttgtgtacaaatgtaagttcttttttttcgccgggaataagttctttttttttgtaaaatgtatcaactagaagtaaaaaatatatataggtgtggaaaggagactatatatgaagtggcaaagaagatttccaacaccctttgatatctctgcctctcaacatgtggattccaccatcctccacaccaacatattttatacctgaacaaaatagttgacatgctgtgagccgttccttccgatccaatgctcatcatgagattaaagaaagttaattccagatgcaaagcaaaaggcagcaccataacatctcctaatatgcccaaaaaggaagaattagagatatattagcacactaaaaaaacatccatttgatttgcctcagctctaccctggcaatagtagtgttgtctctctgaccataaaaatcatgctgttagtttatcatatcctcaaggaacatctttcggtgtcttgcactctggcatttgtcatttgatgatgctgactttgcaaatgcacatctattactagaatactagaaaggtgagtggaaaaattgtgttagtggaaaagaaagctggtgttgatgtgtgtaattgaaaatacagtgcttaattaaagattgcaactatatgcaaccatcttgtgaccaaatggtaagtaacaggccactttgcatctgatcaggtggtcagctgcaaagtatgccttttcttcagagtagtcatgaagcatgccttttggtcttgtgatccaagagaacactgaaatcagagtttttctttaaattgacttatactagcagctggtaaagaaagccattggagtatacccgaaggctgttcatttgatttagcattttttgtttttatataattagcaaagttgatcttgaaattttacattttggaacaatccgtcgcagattcgtcgcaaaaaggggcctgcccaatggtcaccaagtattgtatgagcctgaaaaacctacatgagttagtatggtttacattgtaatgttgcaatttactgttgatcatggataaatagctcattcaggtaatcatatatcacaagtaatgcgtgtcaatccagccaagttaagacgttgaaatccttttttattttaatgttggaatgattgcagtaatccaacaactgttctttttgttatcaacaaccttatttttttatcatgaatgcactcggttgcttcctcctgaaattctctttaagcagagtcagaagcattacgtaatctgtgactgattatattttaatcaagtaaatgatagtaataataattattttcatgggtgaaggtacttgtggtgaaactgttctaagggctcaatcactatgtgaacattacatcatttattctttcatatagggacatgattaaccaataatccaggatatatagtccacagcaaaatgcaacaaataaattacccccattagtttgctaatttttttaagcagacaagataactacctagtatattaattaacaaacaaggggatttatttatagtacataaactgaaccccattaaattcattgtagtacatttgtacctatatatatgtttccttgctgttcagaggtcaaccatatcctaaactaatctcgggttgttacctgaaccagaagtgcttggcttaaatctcacataagtactcgtaggtttggatgacaaatcaaggtactagtagaccaaagagacttctgactttgcagatagatgcgtgtatgaacagacaaaggaagctgataatcctatgtaggagtaatctttaagccatcagtgtcggctgttttctgcaaaagacagagaaaactgatttcttaggaatgcacaggacgtagacttgaattatttgccagtagatttttgctgttttttatgctacttgtcttttcttttttccttcacttgaacagagtgttatgacagggagagcactgttataatgctctgtttacttttgacagtgaaagagtttgataactccgagctaggttcgatcactgatcaatatgtgttaacttctttattttgttgaaaaatagagtttgtcaccggttacccttacccatggcatgatccactcccattccttcgaccattattaagacaaattttacagtagtgcctactagtattagaattaatcgctgtgtatctgcctgtctagaagttagtaatgaattgaaatccaacctcatctgttgtatctgcacttctcagttattacttattacgtattaccgtctctgaaatgtgtaactctcgtctctgtttaaatcaagcagagacaaatattcctttttagcaaggcgaactgatttttttttgttatttcacttaatctgttgcaacacactgtattttgctagcactaagaaatgtacagagtaactccactgacggattaagcgataaaaaattcagtaattctacatgtattcctgttttatctagaacatttgactagactgattctaaaacagctgaataaaggaagaaattgccacgaagaacaagttacaaacaacttgccactagtatgttttgctactaattaacaactttattgatttcttcttgacaccggaacgtacgggagattgggcgacttactaccatctgatcatcttatgttgacctgtgctaatccctccagtgcaatcgccaaatggaggccatccatttcacagattaattatagctgttaattaatctctgctactgacactagtgtcatccactcacatccgctgacttattccctaaatcaccgcctgctaaaaggtctcctctcctccatctctattgcccactaaactaagctccatcatgatgtactataacattagcaggaaaatgacatgaaacaaaatgtatatccttgttgtgcttcctaatggatccaagaaaataagccaaacttactaacaaaataacttaatccctggtttcataattcttgatattttgaataagattaagatcaagacaataagaactttgactatcaacaaattttaaattatttaatttaaaaacactaaaacacgatgtatagattattctcgaaaagaaatttaacaaaatcaaacatttttacttattttttatgtgttataatagaaaatcatagttaaagatatattttagaaaccatgtagatatccaaaacctgaagaactatggaaatggagagagtactctgatacagagactacgtctgaacgcaacaatttcacatgaaacaaagagttagatttactccatcatcttaaaatataaaaagaaatagtttggtccctcttcctagttcatttggtctatagagttacatgacctagaaaatgaaaagacacgtcagtaagcaaacaggctttgaaaacaattaacctggagaaataggagtttaggacagctcatgaagctagtatcaaacttaaccaaagagtcaaaccccagacatgctagtagtcagttagttaaccaaccttctccctcctctcttccacttcgtgcaagcatgaagcttagcaagctcaagctggatcggatcatctgatgtgaattctctctcacaccaattcaccatggatggatgcccatgaccatccttagctccaggaagaagaagaagaagtgaacagtagctatagccatgggaagcagaggaggagctttacctgttgctgtactggtgctgttgctactgctggtgctcaagaacggcgccgcccagtcgcggtgcagctccggcgacctcgccgcgctgcgtggcttctcggccggtctcgacggcggcgtcgacgggtggccggcgggggtcggcaacgcgtcgtcgtcgtcgacatcggacggtggcgactgctgcgcgtggcgcggcgtggcgtgcgacgaggcgggggaggtcgtcggcgtggtcctgcccaacgcgacgctccggggagtggtggccgagtcgctcgccggcctcgccgcgctccgggtgttgaacctgtcgagtaacgcgctccgtggcgcgctcccggcggggctcctccggctgcgggcgctccaggtgctcgacgtcagcgtcaacgcgctggagggggcggtggcggcggcggccgtcgtcgacctcccggcgatgcgcgagttcaatgtctcgtacaacgcgttcaacggcagccaccccgtgctcgccggcgccggcaggctcacgtcgtacgacgtctccgggaacagcttcgccggccacgtcgacgccgccgccctgtgcggcgcgtcgccggggttgcggacactacggctctcgatgaacggcttctccggcgatttccccgtggggttcgggcaatgccggtcgctcgtggagctctcgctcgacggcaacgccatcgccggggctctccccgacgacgtgttcggcctgacgtcgctgcaggtcctcagcctccacaccaactcgctctccggccacctgccgcccagcctgcgcaacctcagcagcctcgtccgcctcgacgtctccttcaacaacttcaccggcgacctccccgatgtgttcgacgcggtccccggtctccaggagctctcggcgccgtccaacctgctcaccggcgtactccccgccacgctgtcgcgatgctcccgcctccgcatcctcaacctgcggaacaactcgctcgccggagacatcggcctcgacttccgcgccctccagagcctcgtgtacctcgacctcggcgtcaaccgcttcacggggccaatcccggcgagcctcccggagtgcagggccatgacggcgctaaacctcggccggaacaacctcaccggcgagataccggcgacgttcgccgcgttcacgtcgctgtccttcctctccctcaccgggaacagcttctccaacgtctcgtcggcgctgcggactctgcagggtttacccaacctgacgagcctggtgctcactaagaacttccacggcggcgaggcgatgccgaccgacatcgccgggttcgccggcatcgaggtgctcgtcatcgccaacggcgagctgcatggcgccataccggcgtggctcgcaggcctcagcaagctcaaggtgctcgacctgtcgtggaaccacctcgccggcccgatcccgccatggctcggcgagctcgaccgcctcttctacctcgacgtatcgaacaactccctccacggcgagatacctctcaagctggcgtggatgccggcgctcatggccggcggcgatggcagcgacgaggcgcacgtgcagaacttccccttcttcatacgccccaactcgtcggcgagggggaggcagtacaaccaggtgagccggttcccgccgtcgctggtgctggcgcggaacaacctcaccggcggcgtcccggcggcgctcggggcgttgaccagggtgcacgtcgttgacctgagctggaacgcgctgtcggggccgatcccgccggagctgtcgggcatgtcgagcgtcgagtcgctcgacgtgtcgcacaacgcgctctccggcgccatcccgccgtcgctggcgcggctcagcttcctctcccacttcgacgtcgcgtacaacaacctctccggcgaggtccccgtcggcgggcagttctccacgttctcccgcgccgacttcgacggcaaccccttgctctgcggcatccacgcggcgcggtgcgcgccgcaggccgtggacggcggcggcggcggcgggcgcaaggaccggagcgccaatgccggcgtcgtggcggcgataatcgtcggcacggtgctgctgctcgcggtggccgcggtcgcgacgtggcgggcgtggtcgaggtggcaggaggacaacgccagggtggcggccgacgacgagagcggcagcctcgagtcggcggcgaggtcaacgctggtgctcctcttcgccaacgacgacgacaatggcaatggcgacgacggcgagaggacgatgacgctggacgacgtgctgaaggcgacgggcaacttcgacgagacccgcatcgtggggtgcggcgggttcgggatggtgtaccgcgcgactctcgccgacgggcgggaggtggcggtgaagcggctctccggcgacttctggcagatggagcgcgagttccgcgccgaggtggagaccctctcccgcgtccgccaccgcaacctcgtcacgctgcagggctactgccgcgtcggcaaggaccgcctcctcatctacccctacatggagaacggcagcctcgaccactggctgcacgagcgcgccgatgtcgagggcggcggcgcgctgccatggccggcgcggctgagcatcgcgcgcggcgcggcgcgcgggctggcgcacctgcacgcgacgtcggagccgcgcgtcctccaccgcgacatcaagtcgagcaacatcctcctcgacgcccgcctggagccgcgcctcgccgacttcggcctcgcgcggctggtgcgcgcgcacgacgacacgcacgtcaccaccgacctcgtcggcacgctgggctacatcccgccggagtacggccactcgtcggtggccacctaccgcggcgacgtctacagcctcggcgtcgtgctgctcgagctggtgaccgggcggcggcccgtcgacatggcgaggcccgccggcggcggccgcgacgtgacgtcgtgggcgctccgcatgcggcgggaggcgcggggcgacgaggtggtcgacgccagcgtcggcgagaggcggcaccgcgacgaggcctgcagggtgctcgacgtcgcgtgcgcctgcgtcagcgacaaccccaagtcacggccgacggcgcagcagctggtggagtggctggacgccatcgccgccgccgccgccgactgacacgaagcagcacggcgttagtatatgaacaaaaaaaaaagaaaaaaaaaagacgagctgatgattccagtgttctgcattgctgaaagttttgcagtaaacagagtagattattgtgcagtcgcaaaggcacggtacagtaaacacatggtaattactactagtaattgacagtgtaacagtatacatgtatagtgagtggtgtgttgttagtttacacttgtgacttgtgtgtgtgtgtgaataatagcatctgcagttctgcactgcaagctcaaagttgggctgtgcagcgttcgagtgaatcagaactgctaatttttaaccatgtacttcttcttcatttcgaggatctgatctgggattactgctgatttggcagtaacaacatgaaacaagaatgcacgtatcatgtcaccatctgttgctgactaggagtaattttctctgttttgtttcgggttggtgatatggtcagttagctaccttgtctgtactgaatttgcaagtagatataccgtgctgatgttctatctagagcactattggttggcccaataagccaaagtaaaaaaaaatcaatatttgaattttggagttgatcttaatatattttcaatgtaattctttttagcattagtttttaagttgatatgaacaaatatataaaagttttacgtataaaatattttttattctccaataaactgttttgacttattagaaaatatggacatgacgaatgagattctcagtttttagtgaactttgactggcttgtttgggaaagagggacttattccaaatccctgtcacatcgaatgtttggacactaatttagagtattaaacatacacaaattacaaaatccatttcataaccttagactaattcgcaagacaaaacttttgagtctaattacgccatgatttgacaatgtgatgctacaataaacttttcataattataaattaattaggcttaaaaaattcgtctagcagattagctctcatttataaaattagtttttttattagtctatatttaatactttaaattagcttacatccattggatgtgtactaaaaagattctcgacggcacattggcatggcgctgaatcttcatggcagtggatgccatgcagctgaatccatgttattactgcggttaagtttctgtcctggatggctgcattgcagatatggattaacacgtgcgagattagcagtaaactaacatcggaatcgacaggagtattcctattcctatcttgttaatctgctagattttagtactatactctgatgctttaatttcactacgtagtatagtactcccttcatccttgaatgtttgacaccattaacttttttaaatatatttaattattcgtcttgttaaaaaaatataagtaattattaattcttttcctatcatttgattcattgttaaatatacttttatgtatatatatatagttttagggcctgttcactatgatgccaaaaaaaaccttagcaaattttgacattgttaaaattttggcaacttgccaaaactttggaaggatttcttatatagttatcaaaatttggcatcaaactaaacgtggctacttttttagcaactttaccaaaatttggtaaggttgaaaatgacatcaaagtgaacaggcccttacatatttcataaaatttttagaataagtcaaacggccaaacatgtttagaaaagtcagggtgtgaaacatttagagaactagggagtagtgcactagtactccactatcaggttttgtctgaacatcatcaattcctcatccattgccatggcggcatggcgccgctgccgctgcccccaggctttgatgatccatggtccacatgagcaagaacaaaacaacactcattctgctcttaattaatgtgcaaacagtttgctctgctctaattaatcacagaatcccgagccgacgtgcactccccaacagtaattaccatttacccatgctcatgccggacccgagcaccgggcccacctgtcatcgacgccatgccctttctgagcccaccccactcacatgctggggggctcgggagtcgggaggaggaggaagaaggacacggcatgattgggacgtgggccccacctgcagcgactgttagtccaacgtggcactattcatacgcacccctcggatcgcggcaggggaggtgggacccaccggtacaacctggcatggaggtctacccacaccccaccgacatgtgggccctgagtgaggggggccggggtgtacagtggcgtggggtagaactgagatgggtgagaatgtgatttttaacatacgtgactcggcgcaaggaccaatggggtactcgagggtgagaaaaaaaagagagagagaaagtgccgttgccggtgaggtaatcccacatcatcctcccgcggatttaccattttgtccagttttccgatgggtggacctacatgtcggtgacacagatatcagtggcatagaacgtaattgtttgtaaatggagggggtaaaggggtaatttggtgtccgtcaaagtgcagtcaaagcgcacacactcccgagcttagcttagcttttaactgctcgtctcatcactctccacctctctccctctctctctcttcctcgcgctcccacgccacgcagcagccgcagatctccacccgcctccggcgagcccgccgccgccgccgccgccatggagtacgagcgcatcgagaagccgttccccacccaggtacgtgagtggccaccctccgccggcgccgccgctgcccccatttttgcctctccgggcggggcgtgttgccactgctcggtacctgtttggagtaatgcgtggtcggctgctgtgctgttcttttggatttagggcggtgggttctcgccgaagcggctgcgcgcgatgttgctgggggtggagaagcggcggaaggggcaggaggaggaggaggagggggacgccggggaggtggacgacgagtacggcgcggtgcccaagtcctctgtcagatccgacgccgactccgatgcgcgcagtgagtactcttgcccccccgctgcccaaccattctgacttttgcattttggggttctggtggcttcgttggtaatgcttcaatcttgggagggtttggtcgcctgcattgcacgatttggaccagctgctctaatatggagatgaccaatcctcttctgttcaagtgggttaatgacatgagaaaaagggagatatatctgtatttggcttgctggcaatggttggtgaattgtggttctatagacattgaaatgttttcctttttgtcttttgtcatcatgggggaatttgaagggcaccgaagtccaacctccttctaagtcttgtaccttcgcattgaataatttcaggtagaaagtgcgatggtattgtttttagtgggcagctgaactgaaagtgacagaccatgattgctttgaatcttcagatgatttcagtgtcctcaaactgtgactgatttattttctttgatgtaggaggaggtagcatgtgcgaagaatacaaggatgtagatgtggtgagcaccatctcagaatcttcatcctcgttggagacagggagtgggcaccgatcgcgtgacacccactccatgggttcacgagtaagggtgcctgaggaggactcctgtgactctgagagtgtggcttcaaactttgagttccataaggagcgaggggcctctgctcggtctgtgacggcggcaatcgttcctccattctcaaagcctgcaccatcaaagtgggacgatgcccagaaatggatcgccagcccgacaacaaaccgtcctggtagggctggtggagtgccacagaggaagatggaaaaaactagctttggtggcgggaggctgccggctacgaaggttgtgttggaggccacagaggagatagatactaagagggttgatccaagccaagagaaaagggaaattgggtggcaaaaagcggtgaattgggccccacctgatccatatccagaagttgagacttgtgcaaagtctgcacttgctgaagaaattacagtagctgattcagctggtaaggagtgctgcagtctttatgtcatcatgcctcaggttcttcggtttttctactttccataaagtagtttgtggtacaatatatagtgttattaatccttccactaagagtctgattgatcttctgttgccattagttgagtggagcattatgccatggagggctccgcacattatgaatcactaactcaccatcaccgctgtctcattcacaatggcaatactctgcatttgacaatgtgcagagctttatttccctttcaacagtttagttacaacagttgcatagatgaatttatacagtttgcatgtttgttcctttagatagctgatagtcaacaggagaaccactaatgcaggcaagatttccttttccaaaactttatgtaacacggtttcatcagttttccatgatccactctgttaatacgtcctgcgtgtaaagtatttatccttatttttaaaagtgaacagtaatatttgcatcattttctaatgttccttcaaagaaatggcacaaattttgccttttctaattagaaaatgaacaaaatcatatatggctaaaattttgaatttgtggctttgggcagttacttttagtcgccatgattcatctgccacgcttcagagcgcgacaacatgcatacctcccccaccaacagtccgatcagtgtcaatgagagacatgggtacagaaatgacccctattgcgagccaggagccatcccgaacaggaacaccggtgagagcaacgagtccagattgttctcgcccaactactccacgaaaaacaataggccccaatgcaatcggtgctgttattggccatggtgaatgtagcaacgtggaattaagtgaacaagaattgcaaatgaagactaggagggagataatgctcctcggcactcagcttggtaaaaccaacattgctgcatgggcaagcaacaaggaagaggaaaaagatgcatcactttcgcttaaaggagtgcccatggaccaatctacacagaaggtaacagaaattcgtgcagcagcgtgggaggaggcagagaaggctaaatatttagcaaggttcttcactaaactctatttctcttgttgcaaaaaaaaaggattgtctttgtatgtttttgctaaattgtcccattgatcggtgagtcactctattgcattccagatttaaacgagaagagattaagatccaagcatgggaagatcatcagagagcaaaaatcgaagctgaaatgagaaaaattgaggtaagctttctgtcatccaatagaagcattgtaataatgcattgtagtatcatcttaactgagatgtttttgattctattttgactttatttccatgtttacatgcacattaaataatatgggatttgttcttctgattatgggcttatggctgttggctgatgatcttgtggacttttggtactgttaagaatgcacatcatgccattgacataggaagctaaatatattactgctgttgggagtttagtagctgatcaccttttacagtgttatctgaattcactgtccttccctcttacaattatgtttcaatctgcttatcacagatttgttccacacacagccaataagtatcatatggttacggttgtgaggctgtactgtttattaagatattatattgccttaagagaagagtagtagaacaatgccttcgtctcagactaaaacatagcttgggattatacctagcatcacttgatcaatttttcctgtcacatcggcatgatgcttggtgttttaccataaacttccatcaatttggatattgcatagcaatttaagtatcaattcttctttttttttttgaaacaacctgcaccagtgggacgtttcaagtatcaattcttccattcagatgcatcatactttgttaagagtgaacaatccgatttgctttacttgtccatctctgtacaagtacaattgttcttgtacgatcaatttgggaaactacactgcccgtggctaatggatgtttccatggcttctgtttctccaggtcgacgtggaaaggatgcgagcccgtgcgcaggacaagctgatgagccagctcgcatcggcgagacacactgccgacgagaagcgggccgcggcggagctgaaacggagccgtgcggctgcaaagacggcggagcaggcagaccacatcaggagaaccggcaggatgccgtcctccattggctgctggaactggtgctcgtagtagcgtagctaagctcaagcaactgaagcaagcaaaaagctctcctcactatgtctcgcaagacttgaagcgccatcatctgtttttaccgtgatcttgtagaatattgtcttttgattggtttcagtagatataagtcagaagaagacgagtcacttgtaagtaactatggagcagtatataagatgcaagcttcttgcctttttctgtgctgtgtgcttgttatcttgtacttggatgtcaatctgtcacagtgagctacaagcagctccaccatgctgaggaggtgttgaggctcaattcggattcccggatcaccagtgcagtacagagtatatgtgtgccgatgttcatcactgatgtgagatagaagaacaaagtttttacggaaattcttacccctttagtcctttttactcgtagcgattacagtggaatcatgtttggtcttcacatgtcaataaaactacacaaaaattagtacaccattcaattgttgcaaatacgtggtaaggtaacctctttttaaaccaaacagaacaaagaaaatctggctgggttgtttcctggacaattttttcttcatcctgtgcaacggtttcaatcaataacatactggtaaaatcctttttttaaaatcacacatgaataactgatagtaaaatggaaacatcactcccagagatcatacataacagaaagacaaacataagataaaaggagtgattatatgaatcagtactccaattcacctcctttttcttttcaaaagtcactagatagatattgacttaatctcggttttcatgatctcactacattcctcctgaaggtgatacactgatacacagcagaactttggatcgatttgatatcgaacaaacctcaacgagcattcaaatcaaatgagccctaattatgattcaccttctctcaagaagataacacagatattaattagacagttcaccagcaaatctgataagctacagtcctactactcgaacttcttgataagggagaggtcgttgagcatcttgtcgatcttctcgctgccggggtcgccgacgaacctgccgccggagcggagggaggggacgagggcggaggcctcgtcgctggtgtcggggcagaggttgccgagggtgcagagctcgaactcggcgaggccgtagcggctcagcgtctccctcacctgcctcaccgcgtccgggttcttgtaccggctgaaccgcttcacgtactgcagcgatttctcgaacacctgcgacacctgcgacgacgggtccccgtccgacatgtgctggatctgctcgtacttgtgctccaggattatcgccacctcgcagttcatcaggcacttggccttcaagaactctgcaacccatcaaaccctaggtatcaaatcaaatcaaaccgatacctctactcgattccgattcggacggactcaccttccccgatcttgagctccgccgcgttctcctcctcctcgccggacatctcggcgcgctctctctcccctctcggtggctcacctcaacctcggcggctatggcgttggcgatgcggctgcgggcggagtctggactcgggaggggaaaagaaaccaaggcggcgagaggcgcctcttaacgggctggactcacgatccgattcgctaacaggctaggcccattaacgcattgggccggctcgatctgcacgagcgtgttcctttcggggtgatctggaccgtccatccgtttactactcgacggcggcggcgagtggtcggcgacaaggacggcgggcgtgtcgtcttccccggcgacggcggggatatgaaggggctcgattcccgaggagatcagcatcgggggtgtagctcatatggtagagcgctcgcttcgcatgcgagaggcacggggttcgattccccgcacctccacctcacttctctcttttttttaatttatttttggtggatttatccggtgcggtggtgcgggctccacgtggcagtgaggcaggtggtggcctcgaggcgcccgcgtggattgcagtggcgctgctcgtcacttcgtctcctcctctccaccactcgtcgtcgtcggcggcgtggccatggcgacacccgcgccgctctccggcctccgcccgcgcgctcccgctcccgctcccgcggcgcgcagtcgcctgtgcggccagtcgccgccggtcgtggccccgcggctcggggcgttcccgcggcggcgtggtggggcggcacggtgctcgccgcgcgccgaggccggggacgtggaggcgcttagggcgggggtgtcggtgtacaagccgcggtcctacgacgtgctcgtctccgacgccgcccgctccctcgcctgcgccatggacgagggcaagacccgcctcgagatcgagttcccgtacgcccgcgacctattcattccctttcctccatagattcgcgccaccatctcgcctaatcttttacttagttggttattaataatgcttgcattatctcatcctccttgtctcatttttttttttggtggtggtgcttgtgaaaaggcctctgccgagcaacatctcttcttacaaggtatactttgcatttctatctcaagctcgtctcataactcacactcattgttctagtttcttgctttgttatgagtgaattctgtaacaatgcaaagactaatcttgatgtatattatatagactgctctagtttcagtttgaatgctgctgctacctctgtataatgttgtttcaaagcagaatctctctttttccttggcttcaagttaaaaagggtttagcttttgttgccacatacgtgtgatgaacgcttgtttctaaccatcctaccctgctttgcttcgttttcaagggttcctcggacgagttcatcgacgccaacatccagcttgctcttgctgttgccagaaaacttaaggaactcaaggggactagatcttgtattgtaagttcaagtttcatgccttgtcctgctccagaatcattctggcatttgtgggcatatgcaaatcttttctcataaattatcttctagttgattccaggtgtttcctgacctaccagaaaagcgcagggcatcccagttgttcgggactgctctagactcggtaaataatgcctcatgaaacaaaatatcttaagaggatgcaaaaaattgttttttcccctcatgacggtaggagcttatttggttacatttctctgttttctttttccacctcttgtagattgagactgcaactatcagttccctggatgaggtatctaccggacctgttaataccttcttcagatcaatgagagataccctggattttgactttgctgacgatgttgaaggtgaattgaccaatagctttgtctagtatggtaggagtactacattaaactattaagaaaacagaatttatatttatatgactccaagaggctgtcacgtccaagctagatgaatcctttatcgctagcattttatcagaattttcttatgtctgacctcacttcaatgttcaagccttctctatagaggagataccttggagaaccattagcctgtgatacatgataaataaaattgatttggtaaaaacatctttgtaaatttcctaaaaatgtacaagtatctcttttcgtacaaatggcaaagtctttaagttgctacttggcacagttcaaaattttaaaatagagtggaaggacatggttgatcagtgggtaattattcatatataagcattatggataattattcggtggtatattattgtgtcagattttcagcagatatttcaagtaacaaccatcagtaaaagttgaacattatcaatatgagacagatttcttataagcatccttggaaaagaaaatcataactacctggctactgtgggtacagatcgatggaaatctgatgaaccaccatcgctatatatcttcatcaattgcagcacacgtgacctttcaactatagagaagtatgtggtatgtctaaaatgatgctttgtttcttgccaacatgtatgcaaatgtactttttggaatgcttggtttgcattgttgtgttttggccatcatttggccagttaggtatttattattctactgttaataaacgatcatgttctgagcttgatggatatcactatgaatagaaactgaagaaagaaagttgaggaaggcatgcacagctgcaaataagccttatatgattgccacacgatttactattctactatctctatcccataatataaggcgtgcacacattccaagattcaactttaaaaacatttgaccaacaattattataatataaattaaattttatttgttaaaattaatatcattggattgacatttaaatttactttaagatgattataattttgttgcaataaaccttataatatatgagaaattttaagtcaaagattacttttgaagactgcaccaagtttgaccatgccttatattatgggatggagggagtatatcaagtgcctgatatctaagaaaatgcaaggaattttgaatcaacaccacaacctacagagtttctctttcattttccattcacttgtatattgtagttctttttccctggaacaagaatgaaaattttcaaccttcgatggtggaaaatgtagaatattctttgtagtttgtcacacgtaacgtaaggaaatagcatgcaacacaaggttttgaggaataatgcattaattgtttgtttagcagttgtgttagtttgtgcatttgtttgattcattacccatcactttgctattgttcaggaacaatttgcctcatctgtcccagcccttctctttaatcttgaactagataccttgcggtatgtgtcttatatcccacctgatggcttgttccttctaaactctattgatcgccttaggataacttatgatctttatcctccagctctgacttggggcttctgggattcccaccaaaagatttgcattacagatttctttctcagtttaccccagtattttatatcaggcagcgtgactactctaaggtatccatttgttttacttttacaaacttaaccattccttttgtgtatctgaaccatctatgattagtatttctccctatactttgtagacaattgcagtcactccatatatcgtgaactacagtggtgctgtattccgtcaatacccaggtaatactttagtagaaagtatcaccagcagtacaaaattttgtttggcagtatatgtccgcttcaaaaagatcataaatttgtgcctttcaatccatcatgatatttttgtaacagaaccaaactaaatactaacatatgagaggtgcgattctgggttggcaatcgacatcatccttctcatcatccctattaggtactgatttgagtaaattatttttgtgttcagggccctggcaggtcatgcttaagcaagccgatggttcttatgcatgtgttgcagagagtgcagctcggttcactttgggacaggtcatacaaaattttgcttgcatgaattagttatgtcattttggagttgtggtgtatgatgttccgtgtttttcattcaggctaaggaagaactgttaagagttcttggtttgcaagaagaacaaggaagctcactagaatttctcagaagaggatacaaggtttgcatctttgtctcactttaattgtaaaatgcaaaaatgattagcataatcagcttcatatcatcatgctgatttcaaatgattcgttcgatgtacttctatccctgccacctcatgtgcaaactccaaattcaatatgaaagtttaaacttcattatcgtagcaggctagcagcctgtctcaaaataaaactttaagctctattatggttgcacctccaaagtaccttttgcaaatctgcatttcgtcaagagctagcattgttttaccatctaaagagttaacctgtaataatgcagaatgctacttggtgggaagagaatgttgatcaggagaaatcgtcagcatggcgaacttgaggttgaggccctgctgctgccttgtctgggtgctgatctgattggcggcgagtgcagacaggaacagaagaaaaaaatggttgtctgaaattgcagagcccaggcgacaaggatgcaaattgcctgtgctgcaattgtacattttgtgattgtaacatgttactgtgtgagtaacaggcattagagttttgagaggattttcctttctttttcgatgattatatatgtgttggactctgcttctttgaagcatgaagcaacttcacattttaaatggaaattcgtgttcatccaattgtactttctccccctccctaaaaagcaatatgaatggaaattatccttacaaaaaattgtttcggccactctggagattattctttttcatgctaaaatatgattatgattatttttattttttatcaagacaacattttttttcctttgtgatgttctcaaacacgataagccgtaggaaaataaacaaagcaataagaatagttcattaataaaagtgaatgctggaaaatagaactatcataaaaaaatcccctaaaattaccttgaaaataaagttttaaaattcgaattttgactttaactggtaagctaatatggtaaatatggtaaggttatgctcgttaagtattttagctttaaaaacttgaaaaattgattaatatgatctttttacaacgaaaaattcgcaaaaatgcactatttaatattttgggaaatttatgcgtcaaaaatgaggaattagaagttcgaatctagtaataagtattggcaataactctcagaactccagaagcttctattagtagggacctgtataaagatgcgtgagagctcaaggtcccatctgcaaaaacaccaccgcgacgaacgagcgaagaagtgggaacaagacttcaagagagagaggagagagatcgcggccggggacggagacgatggagacgcgacgagcaacctacagatccgccgcgctcctactcctcgccgccatcctcgcctccgccgcctccgcctcctccatcggcgacaagtgcgccgcctgcaaggccgttgccgtcagttcccgtattcttttctttctttttttttttgcccctctcgtcagttcatacgcgcacaattcactcatcctttggagcaccttgaagcaatttagttcgtattaaaatcgttttataccaggatgggaagaaattagcattccatattttccactccttgtgaaggagatcgaggcgtactgtcctagatctccaaacatttcctcggacattgtagaatttccaaagcgcatcgtttcactgatatggagtgcgcattgtagagatctgatgtatctgttgatcttgtttgcaggcagagctagagattggaatttcaagtgtgagtgaactctttttctgtctgcttttatttaactattctgtcataatttaaaatgctgatttggagtttatgtgtattggaaaatagctctgcaagtttcaaaatgattcaatatatttctttctgtaaaacagcagttcccataaacataatagcataggttcttctactgtccttgttattgtcactattggcaaattattaacttccaagagttctctaatgcaggagaaaccaagaaatcacttggacttgcgcaaccgcttaaattcaaaaggtcagcgtgaagggaaggtcattgattacaggtatgctaaccagcatgatcccttctctgctcaatcatcaggggcaacattcctatgtgttacaacattgttatcatttcatgtttcaacctatttgaatcctaattgtttggaaaccctttgccgcatcctttgttctatttacttgagggagagcgacgtcgtgtctgtcgtcccctatctctcattcgcacgagatttttctcaagggtgagcgtcacgagcgcatgtgagcgccaggagcacgtgtgagagggaggaaaacgggaaaatctggtgttagtttaacagaagtgcccacttttagttttgggatattttaggctttctcttggagagatcaattttttcgctacctattttcacttcaataagccaaaaaagaaatctttgggggaagattatacataatctcctagtgatgttcttagggactctttgaaatacagggttccaataatctaggtgattttagtgccacattttccggaatttgggttatcccaggatcggatcctatatcccttattaacactcccgataatctgggtgattttagtgccacattttccggaatttgggttatcccaggatccgatcctatatccctaattaacactcccggcgattctacccaactaggattaaaaaaacgcgaatattagggaaggacctaatatcaaataattagaaggggtgaggcttcgaacccaggtcgtctattccaccaccttgtggagctagtcggaagactacttgagtgtttctcaaaagagggatgcaacaaaggactttctaggaggtcacctatcctagtactctaggattacttatgattcttgaaaatccaactaattaacattctttgaactaaatacaccctataagtgtacatatataaataaaaaacaaatctataaattaaatgttgtgtcgtttaaattccaattatatcttgaaccacatgaaaaactcacgttacctcttgggtcacttgatgacatgcaaaaagaacaaattttaagacaataaggcctggtttagttcctaactttttctttaaatttttaacttttccatcacatcaaagctttcctacacatacaaatttccaatttttccgtttcatcgttccaatttcaatcaaactttcaattttgtcgtgaactaaacacatcctaattggaaataaatgatgtgaaacccaatgcgtatttcttagtatttattgggaaaagaaaatacttcctccgtcctctaatataagggattttgatattttgtttttaccattcatcttattaaaaatttgttcaaatataaaaaaatgaaaagttgtacttaaaatactttggttaataaagtaagtcacaaataaaataattaatatttttttaaaaaaattattaagacgaatagttaaaccgtacgaatagttaagaggacagagcctacttttgtcaacgagttggagttcgacgtggagcagcaatgaatagccacaaagtacggtagcttttcccatccacgtcacacttcacgctgtcacgtcgcgatctgctctctcttcccactgcagtgctgccgcgtgagcgtgaccgcgtcgtcgtccacggcgagctcgacaccatggccgccgccacggagcagccgcagcagatcaccgagatcgagcacgcccacctccccgtgcgtgggctcagacatctgcttctatttttcaattgcagtatgggcataagctcatgataatctgccatatttacatatgcatacatgttttttggggagaaatttgtattgatcattgttactttaacactaaatgtagagtctctttgtcattttaagtttcatttggtttcacacatacttgcttaatagatgtacaaaacttaccatatattttgtattggtatgtctttaactctgtttatgtggtgcagagtaagtgagcttcgagttgttgagcttctggatggcctatgtgataagatgcaagattataccctgcagaaggtagaaattccatccaattgttttagcattttttttactgcatactatgtccgcatttttgaattttgagactgaccttttcagttcactttttatattaagttgtaatataggtatctgaacttgttgatctggtgctattgtatatgatgcctgcatctgtccaagcattttagccatctaacaaattttgctgtatgcagttggaatcaggagaaaaaggatgggtgaaagtagcagattggaacagttttaaaactggtaatcttggacatttttatcactcgtaaccgcaaaataaatctggagccctgatctgtacattcttgtactcaatatgttaattcgcttatcctgtttaatagcactcttacacgaccatctcaggcaatggtgcaagcacttgatttagactgtacatccggagactatagcctgctttgttattttgagcattgttaatatgctcaccatgataatacaatatacaaacaagttttgcatacattattgagacggtattcatcccatacgtggaaatgaactcaatggaatatatttatgctaaatgagaagcaaacaacaggtgctgtggtttttgcaatgaacttatcacaatagaatcactgaaatagtatccaaaattgctagctacctgtgtttctgtattgcatttgtctcagtgaaagtaataaaacagtatttccaaatactaactgtggactactcacttcattgttcttttgtagaaaagaaggccgcagcacgagcacactccaaaaatttatcctcattctgtggaaggtatgacaaacaatatctatttcctccctaacccttcttgattttttatttgttttttggatttaaaagttgttttattgcatatctgacctcttattacaattttttaatagcacttcttgttgcaaacactttggaacggtgtagtttctggcaggtgtcattttccatagataaaagggcctctattctcacaaataaatttcattatgttgaacttaaattagattatttatttttaggtgcatcgtacacaaacataatttcataaaaaaaatgagtacatatctgtccacataggccttttctggttactaatattttttttccttactggctaatgttttttttattgttgacctgatttatccaggatgaataaactcttaataatctatatgctttgaaagtgagaagttattgcttgtctaaaaataaccttttacacctttacttcttttggtttctaatttagactgttgtgtactgaggggatgaactgacaaagttcactcatggtgcaggttactggaggaaactgaggatgaggtaggctgcttctcttggatgacatttatacattactttttttatactagcaaatatcgtctgaattttcccgtttcttgacagctgtgttttgttatgaactatacagatctatcataatttagttaaaaatagggcctcatctagagctttttttggttgcagctttctgagtggataaaaacgagctccgcagaatcaggaaatgtcagcagagcactttgtgaagatattagcaaacactgtcagtctacaaggtatgtgctatgaatatgaatcgaacattttgtcatcatgaaataagagattgctgtactcgcagaattttctttgcagacctctagttcactaacaatcctttccctctgtttccagtgctaccatcgagatcgacgacgaactataacaccaaagcattctggtgccatctttatctcacaaagcaaagcaggcgaagacctggaaagcgtagaggaacaaactcaaatagtttctgatttcatatgttgtatcactgcaattcatgtccttaaaatgggagaattgcaattcgttccatatagtgtctgtctatctggactaatctgttgagaacattcgaacatgagacaaattttgcatactaaaattacggttgaaagcaacacagttaactgattcagggggacttttgcaaaacgcctatttctgatgcaatcatggtttgcaataacgattggttttttgcgaaaatcacttggttttcgtgaagttgctggggataggtttgtaaaaactgagttttttttagccaattattttattatgggcttgaccgaaagtcattggtttttatcgggtttcattcggtttgcggcacaccgacagaagtataactagatcttgttctgttttcagatatagtttacacgaaggtttcccagtgtttaagaaatcattcaagttctgcactgaagaatttccacattccaaatgggctccatgaaccaaaattgtttttcattggaggtgtagtgtataactacgacgcattcctttcgcatgtacccatgcatactatcttgtgaaatgctcgttgaatcaccaaattatcctccattaattaaaaacccaaacgatctcgtagtaattcctattaaattcatgtaatattccaacagagcccatagtaattttgagtgcaaatgcagcaatactttgttatgtactaccaataaaaattccaacttgcaaaaaaggaaaaaaaaacagagaaaagttacaactttgaaatccgagaccaagagcacgcggaagttgactttgaaattcatcaatttgagtcctccgatttttccgaggggcaatatgcaaatcgcacaaaaaaaatgaaatttatcaactcgatttcccctcatttattgactgctactagtagtaccactatagaaaaagatcaggtcagaattattattacagtaaataaaaaagaaaataaatgcaaagatagaagagaatagtagtagtatagtgagtctcgtcgcagtgagagagagagaggagtcgagtagatagatagatagatcggcgtgggagaagacgacatcgccggcgacgagaccagatcgatcgccgaggtatcgcctccctccccgaccgagcagggtcgccgccgttcgttcctcttgctgcttccgccgcatccatcctggtgagcacatcctcccgccaccgccgccgatccccatccatcgcgcgagcgagtcagggtcgccgtcgttcgcccttctgcttccgccgcatccgttttgcgttagcccacgcacttttttttcctcagatttgcgttaaccctagctctagctgctcctgttctagaaatttgccttggccataatactaatagcagtttgtttgttcccaaaaaggcccatgtcccatgttagatccgccgccactgtgctactgatcttctccgaattgtataatttaacgcatatgctcttttgtatctcagcggggactaaaccttgaagcatctgggctgttgtttcaccattgtagtggattccacttcggaactgaacttttctagttgtttccgtgacaatgaaaactcacgagagagctgctaatttggcccttgcaggtatacatttgtattcggctgagtcatcacagcattggttctgtttattaccattttctagtcctttgaacaaactgggtatttgctgagctgcagttctatgtattctaacattgtacgcaggtttgagcttggcaccccttgtggttaaagtagagccaaatgtgaacgtcatattgacagcatgtcttgctgtctatgtgggctgttaccgttctgtcaagccgactccaccctctgtaagcaatatgcttcagtttgttttgttatctaccgagccatctgctgggtgctaatgtgataggttgttcacaaaattttctgcatatggctagaataacttgattcctgcatttgttcttatgtaggagacaatgtccaaggagcatgctatgcggtttcctttggtgggaagtgctatgcttctctctctgttccttctattcaagtttctctcgaaagacttggtcaatgctgttctcactgcctactttttcatccttggcattgccgctctctggtaagtccaaactctccttggaagagctttttcattcatgtaactacttaatactgtatctgtgcaattaagattgttcatgtgcttattttttttctgatgcagtgcaacattgctgccttccataaaacgattccttccaaaagaatggaatgataatgccatcgtttggtgtgctccatttttccactgtatgtctgtaggacccaaacctcttcttttttttttttttgctcaactcattggttcaattgtgtatcatatgccagattgttgcatctgtgtatctgtcagattggtgcaattatgaatcatgttacaagctcatgtcttggtggcctttttaagttcattaatttcttatttcagcgctctcagtggagtttaccaagtctcaagttgttgcatcaatcccaggatttttcttttgcatatggtatgctgcgaagaagcattggctagcaaacaatgttttggggatttctttctgcattcaggtatgcttttgtgttattttgagatataaggttaatatgcattattgaaataactatggttcaagagcttcacaaatatgttctgttttcctcccaaactttacttggagagaaacctacttgattctctttatcttacagggaattgagatgctatcacttggatcattcaaaactggtgctattctcttggtatgggctgtttgtactgaactgaaacttatattttctggcagaaatcttattactttttttcaccattcttccattaaagccattacttagtagagcatgtcaatacaatttgaattatctgacactgtagaatttatgtttgtctttcatttgcctatgaaattaaaatcctgttatatttgtagaaactattgcactgcttgctgtactttgtaaatcactattaagttgtaacgcttatgtatcacgggatttcctttttgattcaggctggcctctttttctatgatattttctgggttttcttcactcctgttatggtcagtgttgcaaaatcatttgatgcaccgataaaggttagtgttctttataagtgattttgactcttgttttgatacaaaatgtctttttctttttacaaaaaaaggctaatctggttatccccttttttctgcatagcttctatttccaacaggagatgctgcacgcccattctctatgcttgggcttggtgacattgtgatacctggttagtaatgaaatctttagaatgtttagtgctattttttttctggtctatgatttctgattggataccgatgactgatgaatgccatatgagagtgacaacttgtttgaagtcatgatccatagcaagttgttagaactggattatttgataaaaaaatatccaatttaaaaattgtatatgtttaccatatcatttgagtacctttttctgtggttctaaatgtagatatagttagggttctttttgctgatacaaggagtgtaggttcaagtcttgcagaaaataattttaacttaaactactttgttatccagatgagtgcaacaagattagcttcaaagttcgaactacttggttgttgtataatgagggtatatgttgatattacttggttatagttgactttgaagccctggcaatgattcgtcatttttattccagtgataatttatgttagttgggaggtgtgtgtgcatgccttttttgaatgatgcgttgaactcattgttatctttagtagcactgaagtgggagtaacatttgatgctagtcgccacagataattcatcttctcttagcattctctgcaattcttcatccttcatgattgaagatcatgaaattctcacatatttctgcaagcagcaactcttctattaacaaataatactcacttctacttttgtttccaggtatatttgttgcgctagcactgcggtttgatgtctcaagaggaattaagaaccgctacttcaatagtgcatttttgggttatacggtgggtttgaccgtgacgataattgtgatgaactggtttcaagccgcacaggtgagtcatgttacttgggattcttgccatcatgtttcctccactcattttcaaggcacatcataagagtgagtttagttcgtagattatttaaacaaaatgaattgttatacatacattaattaaacaaaggtaattgtggtggtgaatttgcaaccatgtaacctccacacattttttacgaatcatccccaatatttcatcaggaacatgcttgaggaccttttttttttcatttttgtctgtagcaaattcatgcattttgtgagtagcacaaagaaaactataaacctataaaccttatgaagggaaaaataaaaaaaaaagaaaacaagaaaattacatcaggatccaactgttactcttgttactccaattataaaaaggagaaagttgcatctgatttgtgtcatctctgaaatattaacgcactctttgtttttgcagcctgccctcttgtacattgttcctggtgtgattggttttgttgctgttcactgtttatggaatggagaagtcaagccagtaagtctgttaccactgaacatggttgttcccacttgtccattactctgaaccttgagagtagctcaatgaataccattgtcgagcgtgttgcgtgtacatagtagtatttattctgttgaagggcccctttttgtgcttaattactgaagactcgagagtaataacctttggtgcatgctccttaaatgctaccataagacatgggagcacctgtctttgacatgcaagaaagagggttctatatatatgataatatatacaaattcttagtggaatggcactgcatgttcaagatgttatatatcacttgcagctaaacctttctatttcctaagcctgaagcaatgaccataccgtttatacaatcatttggccttgtggtggtggttgttacagaatatgtgatttaggtgctgaaaggcccagaacactttatgatctctagaacacagatggaatactttggtgccaacataaaaaaaaaacatcttttctttctttatattatatattgtgatttgtgactataaatatgtttgaaaatgctatactaactgacattttattacattgccagctcctggagtacaacgagtcaaaggctgaagaggaagatgctgttgaagaagatactgatagcaaacagaacaaaaaggaggagtagcactctaacagcagggcaagaaaaggcagaaatttcatgtaaggtcgtcggcagctaagtaggctggatgacctctcggataccagctcacttaagaacttagaaatgattcgcatgatagaaacccttttttgatttaagaattgtttggtctggtgattagaagagaagagagtagattcttaagaggcctgccaatatggtccagtggcttgactttacccggtaccccttttgctttagtactgacttataatggtggtacaaaggatttacctgaatttttggtctggcaaatagcggtttgtgatatctttcttggtaccttctcttgtttgattgacaaaaccatgcagatgcatcccatcttccgtttggaactatggaagtttcttttatgaggaattgcactctttctcgcaaaaggcttgaaagaccaaattatttgcatcctccagtgtttcaaaattttactgaattaggatttactcttttctgattgaattatgtaacaggctaacagtgtgtcactgcattttgtatggttgtatttgaatgttcatgaacagagtttactttagcttccttcaaagagaatatttcctctagttaccacttttgcaaaaggaagggaagcttgagtgcagaaggaactaacagtgtctcacttagtcaagagtgcgatgcgactgaaagaatcgaacccaattcatcgctgacatccaaagtcacgcctggaaatagatatgcatctctttcactttcctactactttttcttcttgccctatagagttcaacaaatgcatgttccaatggtcctatcttgggacatctacctgtctcgagtgtttttactcttggactcaacttggaacctataccattctgcctataaaggccaggaaccattcctaaaaaacttggaccatcgtgttattaccaagacatgtcgcatgtgggcacacaccactacattacatttacgcctgggattgttttgactattagtagtacatataatattcgtctttatatagcaacctgatactaaatcataacctagtccacattctagattcgtaggatatgtcatatttaatatcaaattgccatatgtttaatagatgaaaaatgttgaataggactgggtcctatgtcagttgatatttgttgttgaataagctacaatagtaaagcaatagaaatatgaattacctcggtcccagatgacatattctaatactataaaacatttgataaagagagagacagagcattaagctgagctttaaaacccattacaatgagagagagagagagagagaagagaaatcatttatttatttctcttcgctatgctatgtagtaacaccatggccttgatatttgctactcctaaatgtttactttttattccctctattccaaattgatctacatatagtttttttaggttatttttaaatgatctacatatttgtgttcatttattgagtctattcgttatttgtgcattggagtaaatgaacattgatgcatgcattcataaacacaagtatttataacccacatgcaatatcttgatttgctattggctagaaaatattggggatggtgtatgcattgagtttgttgctagagtaaatatagtatgagcaaaatattgaggatggtgcatgcattgagtttgttgctagagtaaatatagtatgagagagctattagcttttcttggtcttgtgtacctatgaaatatgtagatcaatttagaatggaaggagtacttctaaatgtttataacccagtaataagcctttatttactgctttctgtctatctttggaccaaattgaagatgtccatataaatggactatgaagctcacgtatttctcaagacattgagaaggtcttatcaattaaatttccatttacacgggtaaagagaaaacacgtttgcataaataagatttaacacatcaattgatgaagtagtatactcccttcgtcccaaaataaatttgttttccactcatcccatgcatactaataaaaaccaaaagactagaatactccatattttatcaaatcctaatgcaattatttctctcttttatcaactctcaatgcacttattcactactccctctgcctcataatataagggattttggagagatgcgacatatcctaggactatgaatctggacggaaaaatcccttatatgttacatccctagtatatgttacatccctccaaaatcccttatattttaggatggagggagtatttttatgaactccggtgcaatattgttcgaaagtgattttattttgagataaatgagggagataaaaaataatattattttgagacaaggagtattagttactttacccctccaccgctaagccaaagaatttaacacaccaatggataaagtcgtatgctttactcaaattatagtcacaagctagaaccaaggctgctagttcagtgcagtgattggtcacgcacttagatctacgcaaatatggaatcatattttttcaattactagtactttctagttcatgtgcattacagttttactactatctatttattcttttctcttttcttagcagtgaacaaccgaaagttagcttatcaactttctgattgccatgcagtacataatataccacataaagcccaaaatcaactagctttgtggtatctataaattaaaatacaatatatagacacaccatagacctgtgcttccagctttgtgagatgccaaactaatgttcgttgatatatatgtatgttcatacgcatttgcacatcgatttcaagtgtaaattaattaatttatccggggaattttccggcagaaggatcagatgctagctaatcatatctggacttactgtcagtctcgatatatagtagtaccaagcaagtcttcctccctttaaatggagtcttatattccgacgtgctcaaagggggaaaggaaagaaaagaaagctactggcatgcatatatgcagatataccctgaatcgacagctcaaaaaaaatattctcagagtattgctttgcaaaatggaatataaatatactccctccgtccaaaaaaaaaacccaattctgggtttgaatctggactcactatgtccagattcaaacccaggattaggttttttttgagacggaggaagtatattttagataatagaatatttaattgagtaataaaacattaggttcatgaacacataaaaaaaaacttcctccgtactcgtaaaggaagtcgtttaagacaatgtttaagtcaaaccttggaaatataaatcataaataactatcaagttgttaagtttaaaaatgtaaaaattatatgaatatatttgtcttagaaaatactttcataaaagtatacatatatcacttttcaataaatatttttttatagaaacatgaagtcaaagttgtattttggagatcgtgtcgttgttcaaaacgacttactttgcgagtacggagggagtatcagagaacataaacatatcatgttgtctcacaacaacctaacactactacaaccgtcaacttcaaggcatataaagtctatgaagtactcttgagaatgtgttcaagaaggtccatcgtttttctgtcggtatcgtccacttaaagtcggtgctatgcagtaagctggactaattaacaagatgcaattaatcccccgaccagctttgctcatataaggtgaagcaacagggacaattaaagctagttttcaaaaataaaaaaaggacaattaaagctgtaagttccctaactttttttttcctgaaaactgtaatctccctgaccagataggatatatatgatgcctagcttgtaatggcgatgaagcataagaaaaagacttgcgcttacactacatatatgggttatgtttattcgatcgatcgtcgtcaatcagatgcatgtgctcaattcacgtgaaaaaactaaagtttttgaaagaatctaaaggagttctgacaaagtctcaagttggtcgaactgacatattttaattaaggtttagtttagttcccaactttttttttcaaactttcaacttgaccatcacatccaaatttttacacacataaacttccaacttttctgtcacatcgttccaattttaattaaagtttcaattttaacgtgaactaaacacaccctaaattattgttcatctcaacccctaattactggagtaattagtcccggtcactccactagagtatgacgagcaacaacccccatcaatctctttttactacacaatcatgctacaacctctatccgttgatttttataaagcatatgcttattttaaaaaagttttcaaggttcactactttgaccattatttttttataagatatatattcttacaaactttgaaaccaatattgtttgaactctctttaaagtatgatttaattggtgtaatttttacaccgaatgtatacttgtagttttactaattgttgatcaacatctacaaagttcgaaattttttaaaacaaaatatatcctataagaatcctaaactaaattaaataatccatgacgtaaaaaataatcaaacataatcaagctaggttgctaaaaaataaaccccatgtgagaaacaggatcaatataccatgcagctactatcataaactggactcttcaggacatatatatgcatagatagaggaggaaataaaataaatgtgtgaactggaagagtcattgtgtgactcatgagaacggctcaactaatttgctacaccacaagtctacaactacactaatcaattaactagactgtccatgcatgcaggatgaacgatgtgtcaactttgacatcatcgatcactacgtggtgtagactcgtgatacacgcttgatttgtttttttcatgctagctaacaagctagttttgcacggtttgttcttccatatatactaccttcttcatatttttatccaacgtttgaccattcgtcttatttaaaaaatttatataattatcatttattttattgtgacttgattcatcatcaaatgttttttaagcatgacataaatattttcatatttgcataaaaattttgaataagacgaatggtcaaacgttgaataaaaagtcaatggcgtcatacattaaaatacggagggagtatatattttaccttaccctaaaattgagatactaccggtggaaatcaccacaaaattcatatatatactggtttctaatttctactagtacctttcatctattttcattcaatatacgatatttcacttatactgtcaactcaatcactagtaataaaatagaaataattggtcaataaaatgagtaaaagaccttgcaaatcaacaattcaaattatatatatatatatatatatatatatatatatatatatatatatatatatatatatatatatatatatatatatatatatatctactggaggccaccatataaaagtaattttttttggatctacccactgtggtgcctcagcttgctttaattaatttactacagcaagccatgcaattggcatacatataaatatacaaattataggccaattggtcatttatattgatattgttaattagctagtataccttttattgaaaatgagataagtacttgcaaatgagccaatccagtcgcttacacaaactagcactttttttctttaagctccagcactttatttattgaaaacgactggaagttcggatttccatgcgtcacttatatatcctgtattttgtcagtctctgaaaatacaaaaagagaagagacatgatactccaatattttcaagtgacaaaattccaaccgagattttccatgtatattattctcagagcaattatagatatctggggcctaatttcataccaaaacgtacttacgagagtgacaggtatacagagaatatcagatgtatgctgattgagaccgtacctgacccattcctaacttcctactctctccgtccaaaaaaaaaaaaaggcaaaccctggttttctgtgtccaattttgactgtccgtcttatatgaaatttttttataattcgtattttcattattgttagatgataaaacatgattaatattttatacgtgacttgtctttttaatttttttcataatttttttaaataagacggataatcaaacgttgggtacggaaaccagggtttatctttttttggacggaatgagtatatatgatcctatatctgatgcaagaagaatatatacccatcctgcacaccaatttattctgaaatctgttaatctaaccaaacatcaactgggccacataatattccagtcacagtagaatgatcttaagttcagaagtaaaaagaaatgtgtggatattcctttctttgtccaatcacgcactctagtctcaaggttgcatgctaccacagcaatggcgaggtggacagcaatagtgatatggtggtggatatgcagagatggaccatgaggaaggccttggcgttagagctggtccaccacgtgtatcttgtattcttgtagaccgctgcttaattttctccatccacgtatccaactttggtccgcagcttattataagccgtaacacctattatagattttaaaatataattacaaataaaattttatatatgtctactacttagcaactcaaaagtcgatgtaaaaaataatctacaataaaataacatcaaaatcaattaaatttcgaattttagatattccttaggttttttaattcttttgagagaggttttttttaatattcagagtctagaggtggagcgacagatgttaaacaattttggtttcaagctcggtgctaggttaaaacttagaagaagatctctagttgttttcatcgttacacgtgacttgcaaggcacgtcataagcggggtaaagggaccatcggggttttctttcggttacgtagtgagaaatttaaaatacgccaggttgtctctagagtcgagtttttaatagttactccctccgtttcacaatgtaagactttctagtattgctcacatacatatatatgttaatgaatctaaacacatacatatgtctagattcattaacatctaaatgaatgtgggtaatgctagaaagtcttacattgtgaaacagagggagtaatatttaattagtcacgcattaattataaaagcttctcagataagataggcagttaattatctgaaacactccttcgagcgggccatctgactacaaatatgtgcacaaagaggaatccaattcttcatcacaagtttttaccaaatgccatttatagtaattatgaatttaggaatactaggagatggtatataccatcgaaacatcgtaaatatgatacctaagatatcaggcctgataccgaactatattagacctgatacacaagtaataacagacaaactgttccaattttgctatgaagaattggggctcatggatgatgtggcagatcatgtcctcttttcacagggttcttcacttcttcctggccagggaagcatttgttcctatcaaaaactaaaaaaaaaaggaagcatttgctatcatgggtcccaccagccatgtaccatcttcctcctctgtcccatcccctctctataatacccaagcaccagaaaatgtgctgaaaatgagcttcgcgaaagctcacgcggtcttcttcagagagaggggtccctactccgtgtcgagctgagcagcagcagcagcagcagcccgcgagcccaaagatttcctctttcgtgggggagacacgccaaatccaatccgtaagttgattttctctctctcagattgatggatgctaccgcttagcaaagaatgtcgcatctttgtaccgtttctcgttcttggctccgaatctcatctttttcctcctgccaatgcgtacgcattcgtgttttttttcttgggctagttcccctcccctactggttgttgattgatcctaagtaataatggttcctgacattcttggggatatgtccatgcgttgagttcttgtaggttcaatccgttcatttttcagtggtagataacaagcacaaaacacatgaaaggttgagttttttttttcctgtttaggtcgtttggttacttgccattccagacttccactcactgtttcctgcaggtctaaaagtctcaggggagcattgtgcagtagtatgtttttttttaaggaaatgcagtagtatgtttgttttgtttgtttattgatgtctgattgacacaggggatagaataaatacttccatgggttcttatgcctagtgcaatggaaggattagcactgcaactttcgttcttttcacagacaaagtgtatggaatatgtggagtccacaactccacattgcttcttggtttgttgtgcagagtccgtatgaacaaagctggcaccgaatcacgcttgcccaatgaaactcggatgtgccttacctttcttttagcctgatgctcatcactgttgtgatttgttctgggatcgcccttctgtgaagaaatcggatagcttgcatcagtcattacattgtgtaagcaatagcataccagaaatgagtgtttccataattcgattcgtcatgtatcgagtttaatcatctgcatttgttatgtcacgttgtttttcttgcaatatatgggatgaatctgtcgattttgttctcataattacttccttcacattggcatctgttttgtcactttggtgtgttccttttctttgttatttttttcctttcaacttttgtactgaagattcaaatgttgatagaaatttacatggggtatgctagtttcggaagaaaaaaaaatgatttacgcgttgttatctcaatgacaaatactctctatcttctttgtggcaggagttctccaactcatcaataatctgcaagatgtgaataagtctcaagtagactttgcaccatttgagacacaatgaagataggtctgctcatgttgcttgttctcttcctggtcatgtcccctgatgggatccgcaggagcttagccgcgaggccttctattgtgaatattggggccattcttcgatttaactccaccattggaggtgtttcgatgattgctatccaggcagccttggaggatattaattctgattcaacaattctaaatggaacaactttaaaagttgacatgagggatacaaattgtgatgatggtttccttgggatggttgaaggtaggctagctgttacactcctttcattttgtttgcattgttaaatagaatgtgctttgtgttgtggagttctgatgatactacattctttgtatcagctttgcagttcatggagactgatgtgattgcaattattggcccacagtgctcaacaattgcacatatcgtttcatatgtagcaaatgagctccgagtccctcttatgtcctttgcatctgatgcaactttgtcatcaattcagttcccattctttgttcgaactgctcccagtgatctctatcaaatggatgctgtagctgcaatagttgactactaccgttggaagatagtgactgctatatatattgatgatgattatggccgaaatggaatagccacattggatgatgcacttactcaaaggcgctgcaaaatctcctacaagattgcatttcctgcaaatgctagaaagagcgacctcataaatttattggtcagcgttagttatatggagtctcgtgttatcatcctccatactggtgctggacctggactcaagattttctctctggcgaaccaactaagcatgatgggcaatggctatgtatggattgcaactgattggctttctgcttatctcgatgctaattcatcggttcctgatgagactatgtatggcatgcaaggagttctcactttacgcccacacattcctgaatcaaagatgaagagtaatttgatctccaagtggagcaggttaagcaagaagtacagttatagttatctccgcacaagttcatatgctttttatgtttatgatagtgtatgggcagtagctcgggctttggatgctttctttgatgatggtgggaagatttccttttcaaatgattcaaggctgcgtgatgaaactggaggtactcttcaccttgaagcaatgagtatttttgatatgggaaataacttgttggagaagattagaaaggcaaacttcactggggtgtctgggcaagtgcaatttgatgctactggtgacctcattcatcctgcttatgatgtcataaatataattggaaatggcatgcggacagttggctattggtcaaattattctagcttgctgtcgactgtccttccggaggttctctattcagagcctcctaacaattctctagctaatcaacatctatatgatgttatttggcctgggcagactgcacaaacgcctcgaggctgggtttttccttctaatgctaaggagttgaaaattggtgtccccaacagatttagcttcagagaatttgtcacaaaagataatgttactggatcaatgaagggctattgcattgatgtctttactcaggcattggctttgcttccttatcctgttacatacaagtttataccatttgggggtggtaatgaaaatccacattatgacaaactcgtacaaatggttgaggataacgtaagtatggacaagtgatgcttttcttcttctgcactttctatcacaggtgatattgatcagaattttcctatcctgcaggagtttgacgcagcaataggggatattgcaattacaatgagcaggactgtaactactgatttcacccagcccttcattgaatctggcttggttatcttggctccagttaaaaaacatattgttaattcctgggcattcttgcagccattcactcttcagatgtggtgtgttactggattattctttcttgttgtgggtgcagttgtttgggttcttgaacatcgaataaatgacgaattccgtggctcaccgcgagaacaaataattactattttctggtatggagctgatttgaacattttgtatcatctgcccacttgtcaatcaatctacagatattaagatacaaaaaaaccttttttgcaatacattgcacatagctagcaccttaaaaatcctgtttctatatttctacacagccaagtcctccaatttgcatgtgtaaatgaggtattgatgagcaatgcacctaaaccttgttttacgtattctctgcatatgcagaatctattgcatatgatagtatgatgcattacttgcacattgcttgcttgatggtgtgcatctttgctaccaaatttgtgaccttaatctcaatttttatattctacaggttcagcttttcaaccttgttttttgcacacagtgagtaaaccaaccttctattatatgttttttggggcaaaagtaatatttcagtctgacacattgctttcatctctatctgctccaggagaaaataccatgagtaccttaggacgtggtgtcttgatcatatggctatttgttgttttaatcattcaatccagctatactgcaagtcttacttccatcctgactgttcaacaactcgatacttctataagaggaattgatgacctgaaaaatagtgatggtcctattggtttccaagttggttcttttgcagaagaatacatggtcagggagctgaacatctcacggtcgaggctgagagctcttggttctccagaagaatacgctgaagcgcttaagcatggccctaagagaggaggtgtcatggccattgtagatgagcgcccctacgttgaactgtttttgtcaacttattgcaagattgcagttgctggttcggatttcaccagcagaggatggggctttgtaagtacatttaaacttgattttctttaacatggattagaaaaacaaagagaaaacaactagacacaaaatataacaacttagcttatgaagtactacttgtttctcatcattaaaacatagtgcttaataaagttcactcttatcaggcatttccaagagactcccctttgcaaattgacctatcgactgcgatcctgtcactgtcggagaacggggaactgcagaggatccatgacaaatggctcaagactagcgagtgctcagccgacaacaccgagtttgtcgactcggatcagctccgccttgagagcttctggggcctgttcctcatttgtggtatcgcatgtgtcatcgcgctgctcatctactttttcaccaccgtacgcaaattcctcaggcatgaacctccagaagatccaacacctcgtccaggcggatcaacaactcttccagacgaacgaacacccccaaagaacggacaagagaaatgcaactgcagaaatttcatctcatttcttgatcacaaggagccaccaaagaagaagcggtccttgagtttgacgccgacaacgccattgagcaactttactgcccttgaaatagaaggacctgtgaggacagtcaggaatggtagtgtcgttgacatatagaactagtgtgtgtaaaaagctgagatgttatatattttggatctgagatatgccatctttcggtcaatctcctcaattttagttgagagaaaatataatcagaggctgcataagatgctatctgtagatttcaagcaaatccggtgatgggaaaaattcatttgaggccagtttggcaactgaaaaactgtatagaaagttattcttgtccttgatggtattttgaatggaggaaatatatacgtctgtttgattaattttttcatgaactttctcttgtcatgcttgatgtgtaccttgtccctgaatctatgtgagcagtcaagtcttcaacttttctgtctaaaccatatgaaatcgcaggtgtctcgattttgaaatgctaaaggaatctgttgtgcacttgtgattgcttgaggtgtactgcacataagagaactataaagcactggatgcagaagtcctttgctgctgggaaaagctcccatttttttgaactgaatttgcaggctatatgtttcaaaaaagaaaaaaaaaggaatttgcaggctcataatacataatccattctagttaaatgtatcagaataaaacaggtcactaacaagttttgtagttgcaacttagcacttattattagtttgagtaattagctgcaatacattatgacatataagaaaatcaagttaacaacgaaataataacaattggaaaaatataaaaaaaaggggggagatggcttttttatttttttttttgaatggaaatggaatattctgaatttctgaattattctcggtagacaggtagcatctttatggatatgatatgcgcgccatttcggctcttctcctccgtccccttcctccgctggattcctccatggcttcctcttccctcccttctagaaccttctaccgccactcgcttccctcctccgcacctccacctccttcgagaggggcctgcgccgccgcatgctgctgcctccgcgcggccgtctcccggcggcgggcagccgcgcagctgctctccgccgccggattcttgatcgccgtctcgccgccttcgctagccgcgcggaggggccgcatggtcgtgtcgctggaggactacgtcacttcacgtacgctcttggtttttttttggtttctgattttgccatcagatttgggataaagcgtgtatttcttgtcaagaacaaaagaaaaggaagaaaaaggcagtaaccacatctaacttgtgctgcaaaagaatcttggatatccaagaaatttcagcttttctagataatctggtggcatgattttatactgtaaatgcagcgtgcttttagatcaatagcattcctgaattctcactgtaaacatcaataacatctgaatttagtttttttccccgagtggtttggttgatttcaaaatgtttgggcacagctgatggcctgaagtactatgatcttgttgaagggaagggtccaactgctgaaaagggctcaactgtgcaggtaatttctcccacctgcacacaattccccattctttcattcctaactgaagtgaaactaatggctatattctcttctcaaggtccattttgattgcatataccgtggcatcaccgctgtgtcaagccgcgaagccaaactactggcagggaaccggagtattgcgcaggttatgaggcaaatcactcctgaagtttgaatgctagtacttttgctctaggacaataagaactaacatgtctgcatctcttcttctagtagccttatgagttcagtgtcggatcgctgcccgggaaagagcgaaagcgggaatttgtagacagtgccaatgggttatactcagcacaggcgtcaccgaaacctcctgccgcaatgtacacaataactgaagggatgaaagtggggggaaaggtatgtacaaggcaaatagccaaagggttgtactcagtggcaggctaagaatgtagcctttgtatctttactttattattgacttggtcatctgttgttctgtattctggtaatgcagaggagagtaattgtccctccagagctcggatatgggaaaaaggggatgaatgagataccggtaacatttcagaatattgaaacagtttctcatgtagtttgatttagtatttaagcacatccaggtactgaagtggtgtagtttgaatccatgcttgtttgcagcctgatgctccttttgaactcgatatagagcttttggaagttgtccctcctgcagagaaatgaccatttttgtttgcaatggatggggaactttcatgaggtattaataggaagtttcacaggttttagtgacaaacgttaatggaattataacattttgttttcttgctgattgttgaacagatatgtaaccaaatatgttcatatgatattttgccgggacatgacttgtttgcccactcacaaggagaaaatagaacaagaagcaaagtcaagtaggtaaaagacatgtactaattttgttattccttatgccgaagcaatattggatcaaaaatattctccacaatgtcgtggagcttgattgattatatggaatggtgatatgatctctctttgtgaactctgcatcctttcgctcaaaggtcctcggggccattgatatcctgaaatgagagaatacattttgtttgagatatatgtttatatttcaaataaaatagtgtttcagtggatgaatagaatgctaaaatttagctcctcatgtaagattgtattgctgtgaattatctacaaattatcctgactgataaatagttatatgtttttctatggccatcccagataaacagtcatatgtgccaaagttagatcatacgatatctgtttttaaactgcaaatttctacatcaatgatattgtgcttcttgggagaaaaagtaccttgttctcgatcactgctccatctgggatttccagtttgacaccaggttgggctgtgatggtcaccttgccctttaaaagataaagagaaaaatatgatttcattgtttaaacactgatcaatgagaagtgaagctgtactctgaattaagattgtgtaaacacagcatataaaaggttgcatacagatatgcagtatttcaaaaatacatgaaaaatagtccaaatattttctgtaagaactataactacaagaaagactataattttaagcaactttggcaaaagtaccttcaatgtgatgctagagccaaaccaaacatcaccggaaaccttcaaggtgtcaagctcaacaatgctggggattgacttgaagcgaccaaggaaacacccgacctgccattacgcgaagaaggatcagttaatttcatttgaactcatgaactaaattaaagcttttgcatgaggaaataatgttggaaggaactataccttcttgaactctggacccagttcaattgagggattcgatgggtttgttctggccgggttgcgtgtaacaaagccatcaaccaaggtatatagatcagactgcaagggtgaaacagttaagttagaatgagtgttaccctaaaaagtttactcagagtgtcatacagacctgtactagctgcaaatctgatgttgccttcactggtaggaaccgggaccttggaacattgataccaattgcgtgatcaaagaactggtacacaaaaatatgacttatcatctttgtatgttaggaaaaagaatgatgatggttatgtagtaatttgttagtaccctgattgctgcaccagctgctgtttccaactgaagaactttaactccatccacttcctgaaattatatgttgcacatgtcagttgtttgtttaattcttctcaaatcattggacagtaatagtgcattgttaccttagggtttggaatgatctccatctttagtgcatcagcctcaacaaggcgcttgatagccttcaagttcacccatctaccaaaaccggcagcaacattagataacattgggacaatctcatctaaaatggaataaagactatatatgaatccacttacagattgttcgtgttgaagatcttgaatttctcgatggatttgaattcattcacctatgtttcagaaaagtgtgaaagcaacctcagataagttctataatatatttagtctaatttgatgtcacaacttaattacattacttacatgtgcatcaggaacttgtgcaatctccaggagctggaaagcaaaaatattatcgtcaccaaaacagcagttacataatggttgaaaattatcctccaaagaaactcaagtctagcacagcaacttgtttatatgttcagtactccaagtaattaaattgcatcattgcggttggtaaaacaaggaagaaccaaagtttacctgaaccttgtcttcatatgagatcagtgtgccacctttaacatcagccagagttttcggggtaacctaaaaatggattttaaaactttactaaccaactatatgtgtagtatcttactcattcgataccacgcaatcacatacctccatgcaatattcattctgtttgtggatcaaatggttcagtatctctgttcaatagttaagtacattcccaaaaagctctcctttcttaaccagaaagtctgtaaagctaatatggtgaattaatggaataactaagaactatatatataaggatactcatgtccactatagcacccaagttatctgagtttgcaatgaacacatactcctttccctgcaataggataaaaagggtgatattacatgcatgcatgaaaactttgtatgaaatgtgggagctgatagtattcctagatgacaatcacaaacctgtgaaagtaacaaatcaagcttgccactgttcatcagggatgggaagatatcaccatggccaggagggtacctgaaaaaatgtgtaatgcaaaggttgtaaaaaattcaaattattcgcctagttcatcttgctgatgtagcgatctatgaagaatggcttaccagccatccttgcaggtcttccccttggaaggccatggcaagaactcatcggctaccacacgaggatactggctctgcattggatcaaatttgttttggtgtcagtagcattttgtaaaacttggcgaaaacaaggaaattcagcagacatgcctgattgaaagtatggacttcaatgttcgaattggtgtatttctcaacaatctgcaggaaaagcgtgccggttagtactctgaaatttgttcagtcagaaaaggttttgtcaggtaagaagagattgccttcaaggtgtcttcatgggtgttgaatgagttcatcagaagcagtgggacattgctgccatacttcttgttgagggactgcaaaagaaagccatgtcaccgaatgccataatgcagtttgcagcaagatgaatcaacaatggatgaatcttgcgtgaagtttttaggaacccacctcgatctggatcacaatcaagtcgaggaatgtgaatccgttgcgcacttcgatgaccgatctgcgaggccatgagcaacattaattctatgttacattgacatgatgatgatgatgaacaatgtcttcctaataatgtccaaattgagaagagattgatgagaagaaaacacatactttggtccggtgcatcccatggtggtgccgaggccgccgttgagcttgagcacggcgagcttgttgagcagcttcttggtctcctccaagtcctccggcggcgccgccagggtgtcgtacggcaccaccacctcgtccgtcggcgtgtggatctttgcccattccacatgctcctcctcgccactttttttttcattaattttggatcatatcgattcagtaatcagttcatcgtcagatgcatacagttaagtagcagcttgatcagaaatggtcatccatggaggataggatgtgtttacctgaggtagcgggcgacgaggctgatgaacccggacttctcgttgtcactgcacgcatgcaatgatttgattcaaaacccaaaatcgatcagcagatcaaacttgagcgatcagatgaggaattaattcagaattaagagactaatataattacctgatctgcgagaggccggcgacggcttcacgcagcttggcgagcttctcgtccgccatttttgtgttcttgccgctgcttcacgctgatctgatgagacagatgaatcggatcggatcggagaaagctcgatcttgttggtttttataaataaacgagaggaaacgagaggagagctcgcatcgcatgaagaggaaacgaaagcaatggcggacaatgcgcgcgacgcggcgaaaacgcgggagcacccaacgtttttacactttcctcttttgtttgttaccttccatttccctcctttttttttttggacacaggtttcccgggcttttcttagagttatttatttattattactgctatttttaacgaggtatatgcttttgtggtgaagcagcacttctcttctgttcaagcatatcaacatttttcagaattttcttcatttcaaaacattgagcattcattcattcattcattcatcatctaattccaatccaatatcttacaccaattgatcagcacgtcaaaacgtattaagatttcagcatctgtacaaagaattaatattaatgtctaggagtcatccaagatgagaaccaagaccagatttttcctggaatgcgctctccctattgtgtttctaacatttcatctaccatccttaggctctcgttttcttgtaccgacatacacacaaatatggaggtaacattcagggttcttcaggttgttggcaacccaaaggaaaggtatgtccatgtcgacctcaatgccttgcacccttactagcttcactattttacccttgttggccacattcgcctcttgcgggctcgacgaagcagacgactctaacttctcacaacttcttggggtgacatcagaatcatcattaggggctgaatctggtgcctgaggagcagtttcggaatcgtcgggtatacgtgatgccttcgagctgaagaactcaggtagcaaagttttcaacgcatgttccagggtgatgtagcttctacctgcaccaaagaaatgtatcaggaaagcactgctgatactgcaccgtaaaacattctgaatcatagcaccacaatatcaagcataatggtgtaagcattattttttgggggataaccacaaccctttagtgaaaccaaatatttcatagcatctggatctctatccctacaccacacgtttcacaggaatgaggggaaatgaaatgtacaacaatagggcactactactgtctcgaaattataaaagagcgccactacttccaggttggtgaacgaaccctttgaagcatgcaaaaacggtatgcaaaccactcatgaaggacaagtaaacgcttgaccaaatttgttctactgtcatccaaaagatataaatgttaattacaatgctacataccttcctccctccgtacttcgaatggtcggttaatataggatatgctttcccaatcaccaacaggtagtgcatcttctaaatcataaaggtcttcttgaacactgcgcacatataatcgaacaggaaccctgcctaaccagagaataactgataagagccaggatggtagctgattcattgtaacatgttgaaatcacttattatgtgactacaagcacacagaaaatttaaaatgtgaaaactatgcaccaactagctactgtataaaaaacttgtgcatatggagtgtatgtgaatgctcaattaatagtaaaggtagacatattcaatgcagaaaagcatacatggtttgccagatccaggagattcaggctcatcagaaccttgttgaccctctactgaggaagttcgtactaagcaatcctcttcgaatggtccaagcttaagcctggtggagatattcatatacccatctaagttacctaatatcaaaataacacaattctggttaaatgatgaagatacagtattcagagaatgcaccacactcaaatagtaggcaatattagtcagagtgcttgatatgtactaatttacaaacaaccatttcataatgaacttattaagcatggctagtattcaagtgttctttctgaagagcacacctttcattactgattgccacaaagcaccttgatcagcctgagacatattcatcacattcttactgttgccagtgatgatgaaggcagcctgcacaagaaaaaagattactctcgtgatcacactccacttccttgctgcaggaacaaaggattgggtaatggcagatctcataaacaaacctctttcagggaattcatgtagctccactttacactatcttcgccatcacagagagttaaaatttcagaaggatatcccctaaaatgaacctacaattttatgatagaaaagcatcatacaagtcaagcaaggaaataaacaaataaataaatgggaaaatttaaacaactctagacttactgttagattccatggtctttctggatctgcacatagaaggtcgtaaagaactccaatgggtatatacctatagtgcaaaggtaaatcggggagttgggaatttgagagggtagttttgaagataatgttagagccaataaattcatattcataaatattcgacacacttcaacaatatgccactgactttgtcgatatccataatatgccgttgccttttccttaacctctacaatttaccatcgccgtctatagtctgttagtttgcattggagaaaaaacaagtgtgcccttagtgaagattggcagcactgagaccatgtcgtgcaaggtaccgagagttataataactgtttatttatgcaacatgattataaataattacgagcacatattttaagtattttaattatgagcaaatatctccaaggctacaggacaggagggggcagatctttgattgggtgccgatgactgttgaggagcggttgaggattgcactgacgacagaaccagcactccagcagggccagggccaccatgtccccttgcaagcgatggcggcgctgacgacggcggcggcaccagcaacagctctccggcaggggcgttgtgtccccttgtttgcgacggcagcgctaatgacgatggcagcaccaccagcagccctccaacagggacgccatctcccgttagatgtgacgacggctttgacgacaatggtcggaccgccgctgtggatggcggttgggccagcgctacggatggtgacgctggtgacggaggtcgtgccggcgctagggatggcggtgctggcgaggacatgtgagcggcggtaggcggagatgcggcgtggcgccgacgcgccgtggcggcactgggaagggtggcaatgcggcgttgggagatgcgatgctaggaagaaagggccctaggccatgcggattagatgattcaaaggatattttggtcattactaaaaaaattaacagtgcaaacagcgtgtagcttgacggcgatggtaaattgtagaggttaaggaaaaggcgatggcatattatggatatcgacaaagtcagtggcatattgttgaagtgtgtccaactcagtggtactgagtagattctctccataaatattggtaggagataacgtatgttaccattttaagggcagccctttgtattcaaaccaaacagtgtcaataccaggcgggagtgtgctgctaaaatgagcctttataattggtaccaacagtggaagatacccgattcttggccccaaagtctgttattgatgaaacagaactccataagtaaagccgataaggtaatgaagtatcataacataacgtaaattaattattaaaaaagatcactcacataaagggaaagatgagcaatgaacccaccttaacatatatggtgtgtacaaactcaaaagtataacttgcatttgttgcacttggtaaaaacaagggagaacaatgactatatatcatgcagcaactcttttctttacacataatatgtgaacaaaacaagcaagtcatcaattcaccaatcaagtccactgagtcaaaaaaggcaccccctaatattgtacatagacctacaaattcaggaatcctaattaaaactgcaatcaacaacctaagtgctagaacgattgtaatccaaacaggcagcctagtaatccagagaatctgagtactcgggatccaacaactcgtggcaaagatccaagatttggatgggagacctccaattgaagagcatagccacaggccgagaaggagaagacgatgatgggaaaagcatgaggctttaccaggaagggcggaggtggggggagggtggtgacgtcggcgtcgtggaggtggacctggagcggcacggcgccgccccagacccgccgcgccgcctccgccgaccacccggcctcgtcgtcgcgctgcgccgccattgccgccggaggagagatctgccgccgccgccgcctaatctttgatggtttttgcttgtcgcaggcagcaaacgactcggatttgatttccccttcttcctctcttcggcaccggtgctgtggctgcatccaccgtccgattctaccttgagattcgtgccaaatccgtgtgtagaaaatctgatttctgattgaactctgtatatatatatatatatatatatatatatatatataaagtgttgtaatttgtgtatggaaaggattacagaacacacacaagaaaaaatccatttaaagcatcagctcaatcaggattaaaacccaacaacgtttctttcatagctctaaactccaaagagaggagaggactggaaagtgtgaagcttcactctactgagcaattgcagtttcatcaacgtcaagtgtgcaagtacaaaatttcttcagtaagtatttaagtgtacttaacagttaactccaccatctcctatcttggttttccataagaagaaaagaattacaggcaacaagagtagctacctagctttttaatgctcctgttctaaatacagcatgccattcatcgtgtttgttcccacacaacatttacagtgcagttgccacaatggtccaagcttcagcatgtcatcaaccatttgcctgcttgaagtgatgcaagatccgtgcagccaagatgtcgacccaagtgtccggcacgccaggaaggcaccaatgcatgcagtcctgcccccatacagccaccgcgtccttctttccgagccagattgccggatgcgcatcggcacggaactcgctcatgtaggtcaggttgagcagctggatgtctgtgccaatcagggcctcctgaatcgccgaattcactagccttgcttctttgttcactcctccaaacctgggatcgaaccacaagtcgagctgcacaagattttgttacagccgcgtcatgattcagaactttaaaatgcatttctgaagcaaaaacagtctgaactcagagcgttacctcgtgttcttgtagaagccgatcagacacgcagctgccattgtgatcccattcacctccatagaagtgcctgggtgactgtgagcgccacagtttcagtgttttacttgggacctccctttcaatgtaagaggccatacttttgaggactactttcaatccatcgtagatgccaagtggcggctcaattggtttccctcctcggtagaaaacaaggggggtctcttttgggaatttatccaggccccacctgataagggacaagcatcaagcattataacaggaatggtgcacgcatggctcctaaccaacctaggaacaaattagaatttacaaagaattttatggagacgcacaagaattttatccaaagaaatttacaaagcaagatgcacaagcatgatctactatgcttagaattttatggagaagcacgcatccaggagatggcatccttggaggaaatttacaatataaaaccaaaagaacattttaaggctgtgcaagaaaggtatgacgagcccacctcccaagtgatgtccagaataaaaagtatgcaatgcttagagtcagagtatcataaggaactatgaacaatttccaaccctactttaagaaaaaggtagcgatgaaacttccactctactttgctagtagtaaacaagacgaatacaacagcaaagcatgcaataagaacttaatgctaaggaaacaattaactcaccaatgtccagtgttgaaaatgagcacatcatagaacctggtgacatttacccattcatcagcaggaatgtcaacatccactctgtaagttccctttattccatccttgtgaagctctttggaattctctacaggctgccaccttcgtatcattagttaccaccatgtgagctttatggttttatcatatgaagcaaagaaagcacaacctcatgcagtataaatgtcaaaatgccatagtcttaagttcaacaattgtagattttaagttcttgaaggaaacagccaaaacacaagaagaacggcatcagaaactgtcaatacatatctaccatatggttatatagttaacagcacaaagtaggataacatataacatatgtttgaacattatcagaacaaattttacacaacaaatagatcataatgcttgggtatttaaatacggtaaatcgtaatttcttcatcacattctatggatctccctgcttactcacccacagtcttatctctaaatcactattagtgcaatgtggataatctcatatttttcagtctggcctcctcacctcaaacctattaatctatgaaagaaagataaccaacgacataagtattgacagcattcagcagacaacatcagatacaatcacagtatgacagtaaccacaccactgcagagtgcagagcacagatactagccatgtcaatgataccaaaatcaagcacaggacatccaaacaaacaagatggaactgatccatattacaacaaaggaatatatgtgacatccatttttctcctgagaatacatccacttcctagttagcatagtggtgtgaaatcactgaattaccaagatcttcctgcaattgcctttttggtatggtataaaaaaaatcatctctatctcatgcatccaattcataagcatacaaagaaaacttaaatctctatagagtatagaccgcatcacattcaatggagaaaattgcatatctaccaatctaccatcacttacagtcttatctctaaaacatcagtactgatgcaatgtgggtaaatctcacctcacctagctacaattcatcccgataaacacatacaaagattgctcatatacacatcctgtagtctaatctaaagatgtaatggcagtctctaacaaacccggaaattaaagcagcacgatttcagcagatagcactcacgtgtacttggcgaggagaactgcgcggtggtacgcgacgatgacgtcatccctggggaagtagccgccgcgccacgcgccccgccgcttccacttgctcgcgccgccgtccgccgaccggagcgcgcacagcagcgccacgaccaggttctccgacagcgagtcccccacgagcccgatccgccgcccccgggccacggccaggaactccgcggcgtcgatcctcgggacggcgccgccgccgcagcgggcgggcgcccaggagagcgcggcgacgggtgggcggctgttgcgggggcagttccaggcgttgcggtggaaggggcaggaggaggtgtagagcggcggcggcaagggctcccgggtggggacccagcggccggcggtggcgtcggagggggcggcgccgcaggggagcggctgaggctgaggctgatgcggcggcggccgcgggggagggggagaggggaagaggaggaagagggtgagggtaatggggaggaggaggagtagagggaggcggcggcgcggcatttgggggagagaccctctccccggcgatcgatcgccggcggcgaggcaggagagcgagacggatactgagtgtgtttccacgcgaggccactgccctgcctgcctttagctttcagagtttttttttttttggcttttttcagattcagacttcttactgtactgtgcaaagtttagatcatggattcatggtatagatgttttcaacataagaaatttccaaaaatttgaagagaacaactcatggatctgaaaaacttgtagctctaccacatgaggacagtttcatgaatcaaaggactctgaatagagatttgttcgggtccaacaaaaagtatctcgaggtactggtacctcacggtaccaaatcattttcgatcgttggatctagctgggctggatatgcattgttagatccaacgatcggaaacgatttggtatcgtgaggtaccgatacctcgagatactttttgttggaccggagcaaatctcctctaaatatgtttgggaaaattcagacattcattcaggaattcagctactctgtacagaaactacagatacaatcacgaccatgaaccaaaaaatatgcatacccctcggtctaaaaaaaactcaattctaactacaaacttcgtagctagatttttttttggacagtgtaatagaggataacaagccaacaacaaaacaaatatattcataatgtaatgttctgttactacaggttaaaggcaattacgcagagcctaattttacagttcaatttctgtgcaatgtccatgctagtcagatgccaacagcaagatcagtttctttctttcagagctgagaatgctcaacccccatctcagacaagcgcgaaagcagcctcctctccagcttcacgccggccaactccgcctccctgatcagcctccggcacctgcccatcctcccctccgccgcgtagcctccgatcaggccgccgtacatgtcgccggtcgggacgaacccggcgtccttcatcctcgccaagtaccggacgcccctctcgtggtcgcgcaacgccacgcacagcttcaccagcacccggtacgccggcaggtcgaggaggccgccggcgtgccgctccatctcccacgccagggacagcgcctcccggtgccgcccgtcgcggcaccggctgtggatcaccgccgtgtacatcaccaccgtgggcctcccgccggtgtccctgaaccagccgaacaggctctccacggcggcgtaccgccggagcttcacgcacaccttcatcacggccgtgcagtcctgctgccgaacgtgcagctccggcctctcgccgagctcgtccagcagcgccgcggcgagcccgtagccctcaggcgtacggacggcctccagcatcagcttcacgtggacgctcgggctcagtgtcctcttgttgatcgtggcgaactcgaggagttttcgggcaaggcctactttacctgccctgatgaacccactgaccatggcttcaagaacagcacggctcgctgaagggacgcactgctctagcgcatcctccatcttcagctggtcgaagcgtgccaagacctcaattgtcgaagcgagaatccggtcgtcggggaagagtggcacgacagtctgcctctgagcccagcaaagtgtctgcaatgccctctctgggagccccatgtgcccaagctcccgaatggtcattgacaaggatcctttccggaggaaccgaacccaccgatcgagcacaatggacacgtcagactccggtggcagcgctgcaatctcccgggcaatcccaatgaggacctccgggttcttgcacacctggtcactgaatgaagagcgtgaagaaagtgcagcccttgctgccagcctgatatgctgctttggtgcaggagcattgggcagtcgtgtcttgtgaggcagtggcagcgggagaggtcgctgcctcaccgggtttggcggctttggtggcttctggcgcatcggccggtcaaagagtgccgagatggcatcaagctcatctttgctccactctacagcctcttcctcatcatcgtcctcatcctcagaagcagaagaattctcatggtatgtctgctcattgcggtccattacctccaactccatgacagaacccccattcgatggctctgtgcaagaaattcgacttgttgatgggagattgccatctctgcagagccaccaagctctggtcttcgccgaggccgtgcaaattccatacagtgcagggagcggccggttaaccagtgacatgcttcctgttttaagattaggcaaaatgttgttacttagaacaatattgattccagatagtagcatgataaagcaaaaggttgcaagtcagcatgtataataagcataaatatactactagtatgaattagaagttcataagagcctctcttatgttcccatcacagccacctgcacaaatatagaagtttgcctcaaaaactaacagacaacataaactactggatttagcacgaggggtgtttctaatatgcaaaccaacagttaggtcacaaagtagcgggaggattttgttgtccttactatttgtatttataattacaaaaaaacactaattggtaaattcccaagaacaacttccaactcaggttttcggcttaaaagtttcctgaaatcaggaattttctaaacatgtactggactttctttttgagcaatttccaaataaaatttcagtgcaaaaacaaattcagatttcagcttagcaaatcagtgattcctactcaggatcagaattgtttgacttcgaaacagagattttatactaaaaaaaattatagggctttcaaatcaagccagctttccaatgtgaaattttttacttttgccttgcaggtttcggaagctttgaaattgccatcatccccaccggattgcaaacatgtttataagagaggctctttgctttcgtttgaacagcgtgaagggaattgttcagaacgaatttgagatgactcgtttcaactgcagttgaaccccaaattccaaaatgaaacgcagagaacaaaacatgcaatcaagtttcatgaaatttcgccaaaaaatacgaatttttctatccgcacgttcccatatcaactcatgcagtgtgtaacttgacaggtcaagaattcctatgcatacaaattagaagcactttgggcattctattcgctcagcaatacgcttgagaacaaacagcacaaatgatgaattagaacagcactaatgatgggaaatacacacacaattagggaaccatggggggaattagagattgcttggcagagactggatttcacctgtgctttgtcgccagatggttctcttcccccgccccggcgaacggcgcgagcaagctcactggctggtataggttgctgacagctgcgctctccctggctggtctctactctgccacacgcagcggctgcagactccagcgcggcctttcttcgcgccgctctgagcagccgagtcgccggcgaggccgccacgcgtgtgcggcggcgccgacctgggctcctggatgagatgccgtcaaaaaatgcagaaatacagttcaaatcagggagcaaaatgcaaaaaatatccatattgggccctcgtggcaaaatgtcgtatcacggcccaaaaaatattgtcctagacttgggccatttgttcggcacacggcccacttaggcccaacaagtcaccctcgtcgtcttctccgatatttaattgtgcagctaattcagctgggagtagtagcctagtaggagtattaactgatcggcgatgacctgacgaaggctgtgtttagtttagcgcaaagtttgaattttggttgaaattggagatgatgtgactgaaaaatgaaaaattatgtgtgtatgataagttgatgtgataaaaaagactgaagtttggatccaaactttaaatctaaacacagccgaagaagaagacgacggaagctaagctagaatgtcacatcacgatgcgtgcttgctactcactgggcttgcctgccgtgcgccgccgtgtcaccagctgccgggcgatggtggaggaggagggccttggccttggaccaggacgcgaggaagcgaagcggagctcgacggcggcctctgggccggactcggcgaccaggaggaaggaagttggtgacgacgtggagtctgctcgccgctcactgcctgagtccgcctcggcgccatgctcggccgcgttgccctcagagccagctgccagccgtcgccgccttgaagcggatggagggatatgtattaggttagggtttttgttgttgttgatgtgtgtgtctatatatatatatatatatatatatatatatatatatatatatatatatgtatatatacatatgtatatatatgtatatgtatgtatatatatatatgtatgtatgtatgtatgtagggatggcaattttacccatgtgtccggggtattcatgtggacacgtccgtccgaaaccgaaagcgcagtgggcaaaaattgggaatcaatttttaccaacgggtaacccatgcctggcccaatagttttgacacaagcaaacttcttgtcaccgacgataattactaggtcggttttttcttggacattaattaagataaggctcgcatagcccgttatcaacgtcgcaacatgtgcaatatatatactctaggtattttttttcttggaaattaattgagattaagctcacatagccagtcatcaacgtcgcgacatgtgcaatatatatactctagatattatatcattacacatatggttctaccgagcctaaccttactagaaattacgttgagtatttcggcttagtagcaatggtacattttttttatagagctcttactaaattctatatgcaggcaatactagttaatgttttcgattttgggtccaactaaaatatgatgaagataataagctcctacattttgcatttaaagacaacggttttataaatttttatcaacctatagatgaagatttagcagtaaaattattagttgccgaatatgtttttttccggcgtctatcttttcatcatacttttttttatcatttgcatttagtttatcaaagaattttgtaataagcggctataacttctattggggttgtttgacaagcggttttactgttgctgcagtcgattgctgccctgtcctggcacggcccaagatataatcctacagactggacccacttctcgccaaatcggcccacttaggcccactcatttctttcctcttcttcctcctcagtaccgacattattattgagcgtcactcgtacgctccctttgcttgtcgtccttctcgtcttcgtcttcttctccaatcgatttaattaattaattatcaagccattaactgatcgaggatgacctgacgatgaagaagaagacggaagctaattaaggctttgtttagatctaaacttcagtcttttttatcatattaaactgtcatgtacatataacttttcaatcacatcatctccaatttcaaaagtagccagccctcagcaagaaggtcacatcacgatgcatacctggtcaaagtcaaaccaaagatggataacacagtaccgctccctccatttcattttatatcggaagtcgtttgatttttttcttattaatcaagctttattaaatttgatcatgtttattgaaaaatttagcaacatctaaaatattaaattagttatattttgataatatatttgttttgtgttaaaaaatattactatattttctataaatttagtcaaacttaaataaatttggctgagagaaaagtcaaacgacttgtaatataaaatagatggaatagtaactaaaactaattaattccaaaaggttaattagcacggttaatcaccggattaatgaagaaggaagatacagaggcagtgacagttaatagcaattaatctccacttcaatgcgtatacataatgcacagacatgttgacgatttccatggttttgacctctggtataaatcctaactccttgtcgctgacgaggtaattgttcttggatattagttgataattaagattaagatcgcatagccagtcatcgacacagcatgtgcaacatctacaaaatactagtaattcagtacacacacaatcatgacaccaaaaacctaaccttacgagtattatacaattaagaactcattttctttctttaattaatcttgatcactttagctcgatcgatcccagcatcatcaatctgcatgcgtaagcagcgttgctgacgacatatataaattagcttagattagctaagttgaaacgcaaatgtacctaccagtccaccactcatccatcaggctgcacccaatgtctgaatcaaacagtactttttttttttcatttccaagttgctggttggttgattgactttgactgacacgtaagtgatcgcaatgggtttaagaaattcaagccactgatcacacggcaggacacgttttcaccacacaaattcactctctcaatctctgaattaatgagctgtataatcagatgtaacagtttttcttctaacagctggagctagtagtaattaactgctctgccgtttgtcttgagctagctggccttctcgtcagattctgattagttagttccaagtatggggtgtaaagtttcagtttgtcacatcaaatattaattatattatatagggtgtcgcataaggtgtttaggcactaaaaaaactaattacagacttcgttagtaaactgagagacaaatttattaagcctaattaatatgttattagcaaatatttactgtagcaccatattatcaaatcatggagcaattaggctcaaaagattcgtcacgcaaattagacgcaatctgtataattagttatttttagcctatatttcatactttatgcaggtgttcaaacgttcgatatgataggtgtaaaatttttgcgtgggatgtaaaagggcctaaatcgattcttgcagctaatttacaactaataaactgttacttcttgattgtttctgcaggagaaggaacaggagacacgtagctgcgcatgcagatacgacgactagttcttcttggatagtaatccaaagggggagtatgtaaaattagttttgttcctggaatcttggcgcatttcaaattgaatacagtttgaatattttaaaacacaaagtgattcggattgtgattgattccatgcgccaactgatgaacactagcagttcttaagcttgacggttttgtttaaatttgtgtacccctagccccaatagaattagacttcaagctgtattaattcaaactggaatgcgccaagatatataacatgaactctgtttggctgttgtgcttgcgctagtgtgcttttaacttttaattgtgttgatcaattgtctcaccaactatattgttgtacctttattattgcctccgttccttttcaattgatacagttgactggtatgaaatcctttaaattgtagtgttttaataaacatctttctaagtgtttgtaatttttctagaagtcaagcggtcaaaggtcatacataaatagtacttcactcatctcatatatatatatatatatacaaggcaccatcatttatttttcgatatttcataatataagacatatatgcatgtatgcaaggaagcacctaccacccatctttaattcactttttaaaaccctacattatcaaaatattttttttgtgggatacattatcaaaatatttaattccattagatgcatgcattttattcgttagtcatccaaacgaagaggtgataatagttatattttttgtctttatgtaagtgatgcatattatatttttttctaatataattattttttcttaattaataatttttttcggccggcaatgttcagccggcgctgcgaaaataatttaaaaatgggttacttcagtactcctacatgttgtccgtaggagcaggattcaagagccacgtagctgcacatgaatatacgccagatgtgcatgtgtgtgattataaatttttttaacaggagtacagctttattcctgatatgttggcgcatttcgattttaactaatagaagattagggcttgtttggttcgatgtcaatttttaccctactaagcttttagtaagtttaatagtggcaaatacatatttagtttggtaccaaattttcatacgatggttcaaatttaatactgttaatattttggtagcgtaaaaacttgtcagtacagtctaagattaaaaattggctccaaaccgaataaacccataatataattacagtacagtccaaaactcaaccttcaatttttttttggggaaaccttcaattgattatagccttttttttattatagcttttttttctaggtatggattttctctcaacaaaacgcggtgttttgatcaagtaaacatcataataatttggtctatgccctaattgaaatcgatcgctgtctgcgaataaaatcaagtcgactggatcgatatcatgcattgttaactgttaagtgaagtccaagtaacgtacttaggacaatctcatctgctgcctcctttatcagtttatggccaggctggatgcctggatccatatatatgtgcatgcatgcacagtgatacagaaacatgcatggtcaaagataaaatcagaccgtgttaattaatttgcgatgtcatcattaaagaacaattggtttagacgcattcgctgcagcacgtgtttgacattctgcagatgttcagtgtagctatctgtatccaactatttattggttgagtacgttcctttcccccaaaatttgcaggtaatttcagttaatataatccacaacgtgtgatatactacttaagagatatgtcactgttatgaccttccaaaaaaaaaccaggagactatggattttcaactagtgttggagtttcagctgaacatggaatgccatttttatcatcttctaatgatactgtacatcaaatgaagattttttgtgttcttcatgcgtgttgtagcttctagaagttcagtctaaaatatcctttatctcgtgtgtttaactgctcatataaattatataatatacccaaaacccaaccatgcgcgtacatatatactcaggggaggaaattaattagaagaccttaaaaatatcagaaatcagaaagcccgttgatcacttcagttgactgcatttttttttcataaacatgtgctggtgctgttgttttgagttgacccagtgctataattctacaattaactgccgtcctgttaattgcccccaccgaagtctaaaaccttccaaaacactatggcactgctacactactatcttccttttaaaatatataaagatattaaattttagacattatatttgacaattcatctttaaaatatatagtgcaaatatgccatatagtttttgataagtcgaatgaacaaatgtcttgctaaaaactaataatgtcataatatatttaaaaatggaggtaatagttgtaatttattcaccatgaaaccaattagttgtgcctaaacgatgaattcagctatacctgactagttgcagtcagatagatgtgtgtgtgaaagcaaacagcaggaccttcccaattttcttgtcctgcctgtcgcatggccacaatttggtcagcaaaacacaatagatatatagatcaattttgacaatctaacatctaattactatttactttagcttggttggcaattaatcgttctgagtagtgttggtgtgtatcgctttccttaatttcctccactgtttttttccctgaaagctactactggtttctttgatgtatccttcagatagccggccggctttccaatgatgctgcctaattactctggtctttgttcgacaaactaagcaagcgtatgcagcatgtctcatctggttgctgaaattaagtatattaatcttcgttttcaagattctaaatttcctagtaacttcttctttccaacaagaaaacaaaaggagcatagtagtgtacgcctcagatagacaatctgatgattttttgacttcagagaagcaactgagaacttcagatatggttcttcaaccttttgctttatcgcttttctgattttctttttcacctttcattttagtcttccatcttagtagcatattgtcagaaatcattgcttctgcatataaatatcaaggcctaattaacctaccttccgaggatgagaaaatccagtgaaaatgacagcttcctacatttctttaggcactgcaattgcgaaagtagatttatttctgtgcataaagtgaaaagtgaaaaaaaagggaaaagttggcattttctcagcactaccatggcatctacctgtaatccatcagtacttaagcaagtaagcatgctgatgcgatttgtggcctttctgcaagtagctcgtggttttgtcaacccaacaatcgattcggaaaaaaaaatgctaaaatgtcaagtatgtcgaaatgttttgtcaaccccacaatcgattcagaaattactatcagatttcttttcgcacttcatatgttccatcattcttttcttatatactccctccatcccacaatttgtttagaatatactattaaggtttaatacaaaagtctataataccccttattaaataatatatgatgagaagtggaatggttattgagggtaaaataggaaaacttttgacaagtattctgggatggaggtagtacttatcatcgtaaaaatcatgcacataaatatatagatcaatggagcacttttgcaagttgtcacttttagggtaagtcaacattaagtatcagctattatatatctgtattgcaggtgatagagcactcactctagtttgctagttgccaaaaacatgcattttgtgcaacacatatagaagcattatttttcttgtgatgaatgggatttagtgcttccatcacttcaacttttatttaaaggaaatcttcatcatttaaggaatagcttttgagttgaatgggctagcttggatcaaccagtaaaaaaaattaaaatattctccacttttgctgtcagtcaattttctcagtcgttatcaaggatattttttttagataatcgttatcaaggatatgggctcatgaatgctagtttttgttgcactcatgcaaacattaggatgaacagtcacatgtaaggaattctgtactgtgtccctttttttccctgttgtaacaacttttttttttgagaaacccctgttgtaataactttgatcggcaggaaaccgtacaaatcctgaagagagtttttttcttcaaccaaagattggaattctcatacaccaattttgaaccggcaaacctgataaattagcggaccacggagtaatatttgctttgcatcatggctatcaaatatttcctgatattatattgttttgaacaataaagtggaagagctctctgacaaaaaaatatgtgataaaaacaagattagtagaaattagtgacataataaaaatacaatcaccagtcttttgtttgtataccatccaagtgcccttttttcagaacgttatcatcctctttatagcacggagttgaatctctttcaattgacttgataaggcttgcacccattttaatggtatcctagtaggaagctaagtcaaaagttgtactttattagagcaaaagtccataattaaatcctctttcaagtttcaacaatatgaatgcgaatacatgagcaagaaatgagaaccatagttctttttggttcatgatggaaacatgcatggttttagatttgtctatactcttggaccaacagggtcacagtacttcactttgacacttctgataaaatcaacaaaatgcaatactttgacatagtctagcaccacatccacaccaaggacaaggagtgctactattgtcaatttcaaagatctcatgcatcagtccatctcctgattaatcactgtcctgctccataaaaaggactgttgcaagaacaataaatcatctattccatttatacataaaataaatctattataaagggagccctggttagcttgcctggtcaaacaaaccaccagcatagatagtgccttggagccttggaccaattccaggcacatcccaacaaaccaaagtcgttaacaattgtcttcttctataaacattgttgttttttttaaacacctgtaatgaaatcattatcccttttatttgaattatttttctttcagaatatcaaagtagacccaatattcttgtaatcacttcttttggaatgatgctcctttataagctaagctttctaaccatatttaatagttcgtatattcttatatttacatgcctatgaaaactgtattttacttttatgcataagtaaaaaaaagtatttttagagaaaatgaaattcttttattgtatacatacactattcatgaaaggacaacgaattgaacctaggctgtgtttagtttgcccaaattctcaactttccatcacatcatatcccatcgaaaatttttctacacacataaactaccaactttctctcaacttcccaacttttccaccatctaaacacagccctacttatattcgcatacatatatatttttagggcaaaaatactgttaacaatgaaaaattgccaatacaggtagtagtattactctaataaatacatggaaagttgtaaagaaatttgcatttggaaggaaaggtgagagctgaattcagtcagagataggccagccacatgcagaaagaaaccggagacttttttttttttgcagcttcttctcctcctcttcctccatgagctctgcagtctgcttacttataatccccccttgacttgccattcccctccccctactcttcttcctcctccctttcttggcctctctcctccacaacccacccttccttcctcccttcctccccttggtgcgttcttgattgctgcagagagggaaagagagagagagagggagagatggggaacatctgtggtggttcagggaaggctcatgtatcgggggattgcaggccgcctagctcaggtgagattctgtccgcttcaagaactcggtttctttcctcttctttatttgcgatcctataagttgggcctgtcctgggtgaagatttcttggtttctgatcgagcgtttggtcttttctctcaagtctgatcaatacacttgaggtttctgaggggcggaaataaagtttttttttttaaaaaataatctcagttattctagctcaagatcatgtttaggggcggtagctgtaagagaatcagggcaacttgttaagttttccaagttctaagtttttttttttgtttttacataatcagtgctgacatggtagcagagactagagaaggaattaaacgaattactgtgactaacacttagttgtttaagatcaatactttcttagttttcttcttcaaatttacatctttaattagcaggttagaatttatcaccaaaaagtagtttcccccctttcctgaatcacacaggcttcatcaacaatataacccctcgtgcaatcctaactattaccttagtaaatggggaaaaaaggactccaactttggctgaattctccatttttctccacatatttctgtcatagccaaacttactgcaagaaggtaacgtgagctgtttgttctacagggacaatgacccccaaaacaagcagcagcgtcacaaccagcaatagcacaactgggaagctctcctctgttggcagcagcttcatggcgtcttccggaagcggcggcacgagcagcggattcgacgacggggtgtacccagagggccagatcctggaggcaccaaacctcaggacattcacattcattgagctcaggacagccaccaagaacttcaggccggatagtgttcttggggagggaggctttgggagggtgtacaaaggatgggtggatgagaagacgatgaacccggtgaagggcggcaccggcatggttgttgctgtcaagaagctcaactcagagagcatgcaaggttatgaggaatggcaggtaaaaatcaggttctttgtttagaaagaaagaaaagaaatacttgaattgcaggatgccaagttggttagcatgagcataggaatcttgcatgcttatggggtttgactttagttttgattactgctgtataataaacttaacaagttagaggatgggatcactttctggcattgcaccattaatggacagataaaaaatgcaccaaacttttgaagtttctcctcatggtcatctcatgcttatggttctttatgtttgtttagcttctgatgacttggctgtctgttttataagctgcaatgtcaattctttaataggcctatgtaatctgggtagtgccaaacggccaatagcccaatgctgaccagaaccatattaatgttataatactagactcttcataattcctgaccagaagcatcctataaaccacatgtttatcacaatgcagtgtttctctgggtcagttttggtattccaggcaaaatattacagctacctcccacatgcctttgcaaactttaacaagatatactactcaattaacttagtttactctaacagatgcgatttttttgtcaacattaataacatctaatcatatttctcaatgtgtaccctgcagtcagagataaactttctgggtaggctctcgcatccaaacctagtcaagctcttgggctactgctttgaggacaaggaacttttgctcgtgtatgaattcatggccaaagggagcttggagaaccatcttttcaagagtgagttcttattggtttgttgctaatcatttccatcatcttatttatatcatgaatgaagttctcttaggcatttcactgaaaatttggggtgattaccttgctcatgcacactgtatttctttccccctgcaatactttgtcttctggagtagaaaattctaaatctgcaaacatataagtgcatgatgtgagaatatctcggggcagttacttgacttgattgagaggtatactgatgatgaaactggccgcatctcttttcagaaggatgtcctccactatcatgggaactgaggctgaagatagccattggtgcagctcgaggacttgcgttcctgcatgcctcagaaaaacaagtcatctaccgtgactttaaggcttccaacattcttctagatgctgtaagctttctgctatttaatgtgcctgcaaccttctcattattgagttcaaatgctgatggtgttctttggcagaactataatgcaaagctctctgattttgggcttgctaagcttggaccaactggtagcaactcacatatcacaacaagggtcatgggcacatatggttatgcagcaccggagtatgtagccactggtatgtgtccttacgcctaccctgcagttaattatcaacacttaacactgcatgtgatagtcatagtacagctgaaatagcaatatgtgtggaatttgacctctcagtcttcatatgttcccaaatttagcgtttttgattgtcaatcatgtcacttacatttttggatgcatgctatatctcctccttctgtccaatgataaaattcggaattttagctaacagacaatataaatagtccatggatgttgaatagaagtcaagtgtgaaaatgaatattgcctaactagaaaggaagcaataccaagtcattgaatatatagaatagtgggtatgcactagctaagtccagagtctagacatgtatacgcatgtgactgtagggctccatcttggacagatatggatgagtaacatgagttagcacctactgccatccaagtggatgatccatcttaggaaaatgtgtgctaacaatcctttttatgtacggatattcgcctaatgtcactttccactcaaaaaaaagttgacacagtgcgcacccaactttcctcaactcgtaccattaatatttcagagttactagttagttttgcatcccacatgaaattcagaattcaagtttctataatacattgtcaaattattattagctctgaagtacagtttactatctgtagatactttcttagctgccggtggttattttcgctttctcactatctgctctactaaatcatgactaggtcatttatatgtcaagagtgatgtttacggtttcggagttgtgatgctggagatgatgtccggtcagcgagcactagaccccaaccgtcctaatgggcagctcagccttgtggactgggcgaagccctacttggcggaccggagaaagcttgcccgcctcatggacccccggtttgagggccagtataactccaaacaagctgttcaggcggcgcagttgacgttaaattgcctggcaggtgagcccaggagcaggccctcaatgaaggaagttcttgagacactcgaaaggatcgaatcaatgaagagccgagcaagggatgcaagaggaagcggttcatcaagggaccatagccatggtcgcaccacagcgcaccaacggtcatcgccgcgccctgatggtcgccgtggatcaaggaccaatggtcacgccacgaaggcacggtgataaacagcattggagctgatgacattcttcctgtaaatggcctaaattttgtctgatgttcagttggagatggtgatgtttatttgttgctatatcatgaaagaaggcccttgttgcccaatcatgatgagtgtaaaatgtagcaacaagaaagatataactgtaatttgtaaccactagaaatagaaggaataattcttgaaatggcttgctcaaaatagcttccccgctgtgttcaattttgtgggtcttgcaaccggagcttgactgcataagtgtgaacattagactgcatcatagtgagtaaaccttgctacttggtagaaattttggccagttgtgtgtgataagaaatcatttcttgagcaaatttgccgatttttgaaaagtgacaagcagcccttgtaacaaaaccaaggcagtagtatcttcagaattcagcaattatgtttttccggagggctaaatatggcagcccatatactctctgattgatgtgagttgtgatcctgctcttttttctaatgacaagttccaaatttccaacagctagaagtatgaatatgcaatgaattactttgcacaaaatgaatacagagagggaattattgtggccataaaatactgggaaatgtcaaaagcactaaaataccaaaattccattccatggaatggaatatatgcatacgtgttgacctgtcagtgttatgacaggctgttcatcctgacttgtgtgtggccgccgcccattttgacgtcaaaagcaacctccatttctctcatgtctccggccaaccgaccaaacatccatccttccttccgtccagctccagccattgttgattgctggacacagcccttgcttatctttgatgagaaatttaacgatatcccttaaagtttttttggtccaaagaaactacacaagaacagggcagaatctttgtacggcctccaagaaatgcactaacagagaaagaatcatcacgatgcagtgtctcagttcagggctctctgaatcatctgcattcagaagtcgctcaaatataaaagtgtagagtccttcattttctttaaaaaaaataatcagtttccacgtagagttaagaaactggaactgtctagacatctctcgtatgattttttggtatgcaaatatgagaagaagaaaatgcagccttgaagaagctggcccaatccaaagctccagcccgatatagaatgaaaccatgagcgcagcataggacgaaaccactatccaaaacagtgacttgatttgctccggtcttgaagatggggatgcgttataccggttttgcggttgagggatatgattcaatcaatagaagagttgaaggaggtaaaatagacttatttcataaataaataaggctagagacggcccaatacactaacttcactaaatgaatttttttcgtttttagattttatttttaatatttacagaaataatctatcgaccaaaaaaattgcagaaatagcccctgccgccctaatggtgggcggcaagctgacgtggcagacggtgggtcaaccgcgccgtctgccgccgtcggccaaaattgcgattaggcccttgccgcccgtacagagggcggcaaggggctaattgcaattttggccgcccataaagagcttgcggccgtactttttcatctgggtcccttgccgggccaaaagatttttctatgttatgttaataataaataaagaagtatttattggtaaaacttgttaatattgttataaaaatgtattgaagttggttgttgcgtaatttcatatgttaagtgaggtattattttgtaccttattcgacgtattagtactcggataatttatataggcctatcacagtctgggtcgtagaaacattatatggacttaaacaaggagaattatataacatgaagaaatagtagtacaatttgaacatgatacaagtatttgcattgcggttacatagatgatattagattcgaactaggagggaggtagtgcaatagttgaacacaacgacgatgtagtaatgggacaaggaagcatgacagtagaaatttcaatatgccaagttgtccgataatagctaacccctacgtgaggatccctcttctttctcaaaccgcgcccctacgtgaggatccctcttctttctcaaaccgcgctttagtaacactgtattgctctggtagttcaagctgcataacacggctaggtggagttagaacccttctggtgtctatccattctctgtattgacatctccttggtggttcctgggagaaaagaatagatgtaaagcaagcaaagttagtaaatgttgtgagaaaataaggattcatgtaatcaaaatattcttaccatgaaatcgtcgtcaagaatatttggacaaacaaagaaccttcgacccaatgttgtaggatttatggaatgaagaacctgacaacgatcaccacacctgcatcttggacgggcttcccatggagggagtgccgtagttagcacccgccagtcgctctgtagttcacgacattgtcgttcataagccgcttttctctgtaagtattgctcagtactttcggatgcgaaataccagcgactttcttgtaaacaagtggttaggtcgagaatgggattttctgtatcgacccactcgatgtatgcgcaagccgtagtgcaggtctgccgaatagagtagtgttacgaagaataaagcgattgcccatacggaatgaataagcatatgcagataataaaatacctcacggtcatagttagggcacctaaaaaagcgccttcctcgaatatcaggattcctcgaagccattagttggcatcgatcaccgcataggcagagaggacgctggcaccaaggtggtagtaggtatacacaaggatcgcaacgccagtttggatcctcaacacctcggcgtctagccattgacgaaagccggtcgaatttgtaatgaagcaagtggggaagagagtactgaatgtgactgagttctgaaggagtcgtgaaccgtgagtagctcaccgcacgtccatgcccggaacgtcccaagctgagccccctgcaccgcagtaaggtgagaccggtgtcggtgatctattgccgggtccaacaactgaggtgtatcctgacgtgccatctctgaaaaatatagtgtttcgtattagaacaattcaaaaaatagtactgtaaaacaaaagataacttgcaaaattatgaaatagtaataaaatcatgagattaattatgtacaacaagagtacaggctatttaaatatagcaaacgttactaatggtacataacgatgacgtgcaatttaacatatatgtagagttcaataatataacataacattacgtgtcgaagttcgacatacatcagcatacctaaagacgttaggcgccttagtccgacgttacatcacgagacctaaagacatgacatgccgaagtctgacattacacgacgaaacataaacacatcgataagttcgaaacgaattacaagcaaatccacatgccgacatagaacataagaactacaccacgtagccagacgtggcacgacgacgcctaggacgtggtcgagtggaggtagtgccttcacccgtagggcgagctccatctgctgctgatcctgatagtcctgcctccgccacacttggtttctccttgtctttaggacaatgcttgtaagtgtgcccatgttcatcgcatttgctgcaacgcttcaccctgccagcctccgactcgtccatatcgttgcggatgcgacgagtcctcctccttccagccttgcctcggagcttcgatgggtcaggaatattgagtacttcatcgttagtctctgtgaactccccagctatgccgaacccataaatctcgccgctccatgtatgatatattgcttgcttactgaagtactgtgacacatatactgcatctggtatgccacactccgctgcggcagcaatgacatgggtgcatggcctgtggagcagcttcggctttgcacaagagcaatgacatgtgccgtcggctttgagaacacactcctgcttcactctcttgcggtagatacccctgcctgccttatcttgacatagtatctcaaacctgtgctgttgggtaccttgcactagagctcgatgtttcatggcctttttacgcaactcctctagctttttctgcatgaaagctccaaacaaaatgctgttgttcggcatagagggaagaactgcctagaaccgatccctaaaatacctgcatgtctcatgtaaaatgaactccactatgccaactagtggtagtccacggacaccgcgcatcacccagttgtaaacttctgccaaatttgttgtcattattccatatctagcaccacctgtgtcatacgccttggcccatttctcttttggttcatgcagaatccactgagaaaatttccgaatctccaatccagttcttctaaccaatgttggactatccgttgggagaggtccaagagcttgaggagggtcagcaacggcggtcgatggagccgctgcacgctgatcactgcatttggctgtcaactcatctaatctcttccaaagctcattgaattttttctcctggttctgattgcacagcctcttgaacatgttcatgagctccttgttcttgaattgcttgaagaaattagctcccatatgacgcatgcaccacctactctgtacatcttcccaaacaccggggtatcctcgttccatactcccaaactgcaactctcctatcgctcgcagaatgccagcgtgcctatcatgtatcaggcatacatttggcctcataccaacaacttttgttttaaccaatttcaggaaccagtaccagctgtcggtattctcactctcaacaaaagcaaatgccaagggcaatacctgattgttcccatctacccctattgctgttagtatctggccccgatactttcctgtcaagaatgtcccatcaatgcagagaacaggacgacagttcacgaatgccatcttgcatgcatgtagagctaagaacgccctttgcagcacactcttgccaggatgttcaattgaggggaatttcttcacttcgtaagagctcccagggtttctttcctcgataacaccaagcaggcgtggcaaattgtcatacgaggcttcgtaagttccaaatctcatctctattattttctgtttggccctccaggccttggcatagctaatagtatacttgtatgtctcttcaatgtgtcggattattgaccttggttcatatgtgagattatcgatgacatgcgcatacatctcagatgcaacaaatgcacatgtaatgttcctgtggtatttctgaacaccaggtagaaaatatatatgcttggtaacaactgacactgtccaataatccttccatttccccttatacgcgtgcactctccagggacaaccatctttttccttaacacaccgaacttcatattgcgaccggttcgacttggcaacccaaaactctctatgaagtgacactgcaaaatgttttaccgcctccttcatatcttctgctctactataaatcgctccctgaataacctcattttctttgtactcccatctcacactatcctcttcagagacgatcagcccagaaaaatcctcactagcccattctgctggattaatatccgtctcatcatctgacgaatcaccttcctctacacgctcgttgtcagaatcctccctctccatttcatccacaatggcaccgacagtctccccctcgtcggccactccacctggttgaatgcccactggagctactacgcccccgtcctctcgtgcgttgacctcctccacagaagtctcgtttacttcagcacttagtccctcgccatcatccatgttcgtctgcacacctggatccttcgggtgaacaaacggaaccaaagctagaggccacccgcgttgcaatgcattttccaaataccatctccacactcgagagttttgaactggcattagttcccaataaaaaccctcagttgcccgacttactataacattgattgttatgtcacttgtctgtaaatcaactctcaagcccctcattaaccatccttttatagaaggtacactcctctcagccggtctatcaattcccctttctgatacaataaaatctgacagatctaccccagttggcccgtaacggacgtttcctggtccatggtaaacttggaatatttgtttgttcgacatatctgtcaacgaaataactagatcatattactctttcatgcaataaacatctacaacgtaatatcttcttgtgtaagccaatgcaacggtaatgtattaattccaaactagcagatctacgtagttaccgatatctacaatacgcacttctagattagtacaactaaaaccctaaaaatataatgcatttattcaaacaaatttttaaagaatacacactatttaactcaatagtcacatataggatctatgaatattacctgaaatcggcgtctgaatccggcagggcttcgccccttcttatcttctcctcccctctcttcttttttttttcactggaattgaggagagaagaatgagggctggggctgggcagcaggccttttataggcagcgaggcctgccgcccggccagagggcggcaaggggccgcctgcaaaatagccggccccgactggcttttttgcattcgggccccttgccgccccaccagagggcggcaagggttttcatgcaaaaaaaaccctccctccgtcaccgcccgttcctccccccgtttgccacgtcagcttgccaccccagaggtgggcggcagggtctatttttgtagtttttttttgccgatagattatttctgtaaatatttttttaaaaaaatctaaaaccgaaaaaaagtctcactaaatgcacaatatgcgaaaagccccctcgaactcttcgcaaatggcgaactgatccccgccgctcgcttcctctctctcacactcgactccggcgagagcacgggggccaaagccggcagagcgcggctagggcttcggctgctccggccatgcgggtgctccccctcgcgctcgccgccgccatcttctccggcgtcaccgccatcctcgtctacctctccggcctctcctcatgtaatgcgcgcgccttttttcttctgcttttggctttgcgtgtgtcgattctgaggtgggatggatgcgtttgtgcgtgcgtgcagatggcggcgctagggtttccgatgcggacttggcggcgctgggcgcgctgcagagcggcttcagcaagtgtgtggtacggtttcctgatctgtctccgctgttaattgatcctgttcactgtacgggcaattgggattcagttgccttgtaattgtgtgcaattagatgctacattgtgagatttggggccattagatttccacactcatggagaatcggcgtggtgattagttattgcttcgtaaattcttgatttatcgtggtaattgtttactcaaaggcatagtaattcagtagactgtcctggtatgtactttgttgtatcgatagtatcctaatatacattcacgaaggaaatttgtagtgtattcttgtttgtggtgacttgatgttcggtatataaagatcattaatgtgtactcgtgctaaaaacaatcaggatgcaaatggtctagggctgaaagcaattccaggagaggattactgtcgagttgtaatacagtatccaagcgacacagattctaagtgggtaagtgcacatgtgctgtgtaatttccttctggatgcaggccttcccatttcaaatgtagtcagctcctgacatagtttgcaaagcctcttttaattcttgctctgtacttacatcgcatcctaccttatgcttctgaaaattgccactagcgtgaacagtactcattgcatactcgtgccaccttttgtgatgcgtagggatggcaatgggtcgggtcgggcatgggtagagcaaaaccatgcctgacccgatgcccgacattgccagcccaaaccctacccactagaggtagcgggcaaaactccgtgcccggcgggcgcgggtatatctggcgggtacccaatgaatctcacatgaataataacttgaaagatatgtaatttaacaaagagaaataaaatcaataatttaccaaattatcggttatcaacaataatttgaattacatcataacttagtatcaattagcatcacaaatgaaccgagagaaatggtataagaattaagaaatgagtcaaaattagctaatacatatgtatcggattgggcatggtttacccacgggtaaaaaatgaaacccacctattacccataacgtcttcgggtctcgggcgggcgtgcccatgggtaaaaagtcacacccacgcccgtacccatcgggtcgggtatccacggatacctggacccatgggtaaaattcccatccctagtgatgcgtgtgtttgtttttcttagttcttatgcactgatatttgcagaaagatccaaaaactggagaacctgaaggtttatcatttgagttcaatctctgtgaagctgtggcttcatgggagcaggttagcattcattcaactgacatatgtatgtgtttttttgcagatgcattgaagtttaatattatatgatataatgtaaaacatggcaatcctcagtatgtaaacactgtgtccagatatttgttagatcacagtattagctatttttatggacttatggtcactcagttgcttttttcctaggttcgcaatagcacaacaatacttacaaaggagtacatcgatgcgttgccaaatggttgggaggagtatgcatggcgcaggatcaataaaggaatccatctgtgggtacacatacttgcagtttcatcaagatttgcagcatgattaactccacaaacagattattgagcatgtttagtcttgaaattgcaggaacaagtgccagaacaggactctttgcatggaaaaactttcattagttcttcctgagacaccaccatatgtacctcggcaatttggtagatgtgctgtagttggaaactctggggatcttcttaaaaccaaatttggggatgaaattgattcttatgatgtcgttattagagagaacggtgcacccatccaggtttctttaagatacttatgtttgctgctcttgtgtcgttccactcgaacataaactgacttctatttttattgaagaattatacagaatatgttgggacaaagagtacatttcgacttcttaacagaggatctgcaaaggctctagataaagttgttgagttagatggtaggtctgtcagccacctattttcccatttggtgagatactaaggcatgctaatttttatggttgcagaaacaaaaaaggaagcccttatcgttaagacaacaatacatgatatcatgaaccaaatgatccgggtaatttagctgtcctatttaagaaaaatacggtagcttgggtacatattctgtgttctcttacctgcctgctggaattcttgctatgtaggaaattccaataaccaatccagtatacctcatgctaggcacatcgtttggttcctctgctaaaggaactgggcttaaggctcttgaattcgctctgtctatgtgtgacagtgtcgacatgtatggatttacagttgacccaggatacaaggaatggttggtgcgatcgatcttacgcactaaatatgatgtatgttgatgtgcagatctgcttacagttgatgtgatgatctttcaggaccaggtacttttcggagtccagaaagggacacactccattacatgggagagcatattatcaaatgatggaatgtcttggtgtgagtttctcatttcccctaatccgaactaatcaaaccattcctacatggaaggattattacttagccacactgttatagtgtgaagagataacttactgtttttaaatataaacatgtgcagcttgtaaaaatccactcacctatgcgaggtgatcctggcagagtagtaaagtgggctccaaccaaggacaccattgaagctgctagggttgcttctgagaaactgttgaagtaagttttgtggcctacctttatttagtatggttcttgcttccattcgtcaatcactccatggcaaccccacttagatacttagttactagatattgattttcatctgcttggttctggtgcttaaattaactaaattaatcagatatgtcattatgccacatgttgtataacttgaaacttcgtcgttgcaaaatgcactataggagacctggggctggaagcgagggccctttgagctcttgcaccatgataaagaagcgcgagaaagggaagacaccaaaaagatctgttgtccgccatgctgccttgaagcatctggagtacatgagaggtgccaccaggtaccctctggagcggaatgctgggggtggttacctctgcatgatcaacgaaagatagacatatagctgcccatattctaggagtggctgaattcatggtaccatgaagcagaacactgtaccccgatgaatgaatcctacacggataaactattttgagggaacattggtgctcatttttgtacagagccggcagttgagatgattttacgcatgagtagtcacaatgtgttgtaacttacattgaaactacacaagtgttgtgtgatggaatgaacagatagcggggcagtttgctgcgcaatgcatcgggtcgccaaatttgtcacctgtaactagaagaaatcttaactatgtacatggagcctgtaattcgtttggcagtagacatgcactatttgattggcatgatggcatcacattctggaacttactatgtcttaacttgcatagatatgttgaccaacaacttgaggcaaatcattagtatacaaatgatctctctgatactatttccaatccttttcatgcttctgaattctgatgttgatgaacagtatgtattgcacttatgcaaagttctctttcgtgagctgttagtgcatgctgatgtacttctgctaccttgttcacctgcgtaagctcagttcttgcacacttccatggactagaagaaacgaaggaatggtcatggatgatacatgagaattggaaagaaacaaacagaacttaaaaaaagttgtggaaccagtaaaccagacaagtggcaaacataagctgattattattattattaccactgatcatcgttcaacactcaaaagtggactatagatctgtagtatgcattatgctagagttgatatgctcttgacagacaacagtacgaatcaatcaatcccatgatcttaaaggaacttggtgtgtagatctgggttcttggtgcagtcatctacgcaagatgcaacatcagcttgccctgtcaaggcatataagcagacacagcagtgagaattcggtgaggaatcagtcaggataatctcccaaatacgatgcacaaaagacatacacaaaatgcagattgttctagctatctgatcttaccattcaacgccatgccgcagatggcgagcaggcaaaatttgttgcagtcgccgacggccatcctcttcttgttggggctgcaatcatcgatgcatttgagcacgcagatgaaccgaggcaggctcttcctgcagtcagggtagcactgcaagtagcatctgcagaacttggacatggcagccacctgatgaagctgatcacctgacagcaggatgagaatgcagcagagagccactgctgcagctgctcccttgccctccatcgatttgagtcctcttcctctcactcataacttctgtagaagcagatggtgttaaggctgggtcagtcacttgatcagcacaaggattttgcagaagagaaatgacaaaactaatgcagatgaaatcaaaatgtgtggataccttatgagcagcttctgagaagaagagagaattcaccaattcagtcttttcagttgatgtagtagtctgttgtacttgtacatcatgccacatacttactgttttatttatggtgcgagtgctattgtgtttcttttattgttcatgccttttttcagaagctttacctgcagagattggtatcagaactgggaaatggaatctcttttttcagatgctttacgtcccaaatgtataccgataaaccaaaagaaaaaaaaacaaatttacgttctgttttctttctacattaaccaagaggattgagatgagacaaaagataagtgccggatacagataagagggctgaactgaagtagtgtactgaaatctgaagaaatgtgttgagcaccatcaataaacctacctctggctttgagattcagccaaacatgaatgaacagcataataatcgatcatatattcatgttgacgataccatcgcaagctactaagctctttggtttgatagagaccaacaggattgcgttgctgagaaaatgagagagaagaagagaaaaggaaaaaagaacatggcagagtggagtgtgggctgaaagttcaaatgggccggccatggtctaagtttgtcttggggaaaaatgggccatggttctattgaccttggggcgtcggcggcggccggcggcggcgaagacggtgcgagagggcggcgtcggcggcggcggcggctccctgcagccacacaacctgctgctgcatggcagcatagctcagtacggcattctggcttactcatgcgaagcaagcccacacttgtggggggagcattctccgctccccccaccatgcgacccctccacggaggacggagctgcatccgcctcccgcccaagttccagttgcatccgcgtcctatccttccattcacactattgaagtattcatccgtcaccatcggcgtgagaggcgaaatccccctctcaacttggccggttgatgatacgtcaggtccagctctgctctgcagtgttaaatttttttcaattccaagttgaaacctgaaatttctctatgttggttgttgatctgtccagttcgagtggagttcaacggcataatcggtatattgtaataccctcacgcagctgcctttgcgactcatatcatgtatggacggtaatccattcctgtactgttataccctcagctccaagctcgtcgatacattagattaggtaacaccgtatggtaatcctattttatattttacaagttgcattcttagctagatgagatggttactgaatcaacaccttacttttgtcgtggtttgtaggtgcttccaggaaattgctttgtactatccttacaggttactactatttagaaatgttttgttccttcgtaatgtttttcgctgccgcttgtaccacttgtattatagtaatgctgttccacgcatgaacttatctcgacagtttttttaagctaaataactggtctgtagcatcatgagctactagttttgtcaaggtcgatggatacactattattcattagcaaagataactgtgctgcataggtgcatggagccgtagacagttcactaataaactgtttaccaatgctttattgcagctgtgtactgaagaacctgcagtgtaaacctcacatcttttttatttgactctttatatgctgcatgccttgtgttatgccatccctgttgcttccataatgcatcgttgcgctccattcttctaaatccatcttcttgtgcagggcttgttctagcctccgtcgccttagttgcagtgtggataatggggttggttgccactgcaattgaggctgcaataggatgggtggttgagagcatcctcggaaatttcttcactggacagatgcaagtgtggactcgtgaagttggcctttctgaagaagtggaggagcttgagactgagatgaggagcatgcagatggtgcttgcagctgccgagagtagcaagattgacaacaggccactgtccgagtcacttgatgagctaaaagagctgctttatgatgctgaggacgtgatggacgagcttgattactaccggctccagcaacacatcgaaggtggtaacacactcatcaaccttccattccttgtttcttgcttcatgcttcttttgcatttgtgtatttgtgagcttactgtgctactaagagcagctaaataccataatccataggcaccagtcaccgcacatcagtttttatcagttaattgtgattacgttaccatcatttcaacttccattatttaccatttttaagaaaccttaattattagcagtggattgcacaagtggctttcttttgcttgtcccttaacaccaagtttttttcttatccagggaaaggttctactgctgcttcttgtactaaccctgagggaagttatgtgtcttcatccactccatcttacttccaacgagtaagcaacagcataaatcaaatattagttggcctatgcatggaaagaaaaggaaaagagaggaagaagaggagcaaactcatagcaccatgctgcctcttgagattaaacatgatatttctaagaggatcaatgaaatagtgaattgtttacgcactaggtgcaagcctgtgcaaggagttcttcagctggagattttacgccaaattgcaatgccaaagcacagtcagagtgagcccagaaagcctcgtcagacgacttctcttgcaattgaacacaaggtttatgggcgggacacagagagggacaacataatagagttgttaacaaaggtgaaatcatgtgatctaggtgttctaccattagttggtgttggtggtgttgggaaaactacacttgccagatttgtataccatgatcaaagaattaaagaccattttgatttgagaatgtgggtttgtgtatccgataatttcaatgaaaagaacctaacacatgaaatgttagagctcgtgtgtaaagatagacaaggttacaaaaatataatcagttttgatgtgctgcaaaacaccctttgggaggaaattagaggcaaaaggtttctgctcatattggacgatatgtgggaagatgggaacaggagcggatgggacaagctgttagctccattgaaatgtaatgaagtaagcggctgcatggttttagcaacaactcgaagggcatcagttgcaagaattataggaacaatgagtaaggttgaagtgaatggtttggatgaaacagtgttttggttgctcttcaaggaatgggcatttcttggtaatgagaagctggagtgcaatccaactttgcaatccattgggaaacacattgctaaagcattaaagggcaacccactggctgcccgtagtgttggtgcacttttgaataggagtgttagctttgaccactggaggaaagttcagcacaaatggaaatttcttctaaaacaggatgatgatattttagccatcttgaagttcagttatgaatttctaccggtccacctgcagcactgtttctcttactgctctctgttcccaaaggatcataaatttaatgggaaaaaattagttcgtgcttggatatcgcaaaattttgtgaagtgcgaatgccgtgctgagagacttgaggaaacagggaagcaatatttggataatttagttgattggggcttctttgaagaggttgagtcacactatgttatgcatgacctaatgcatgacttggcagaagaagtttcatcagatgagtgtgatactgtagatggattggaatccaagaaaatttcaccaggtcttcagcatttatcaataataactactgcttatgatagagaagaaccttgcaattttcctagggagaagtttgagaacatactacagagtatcgggtctttgccaaagttgagaacattaatgttcttcggtgaaaatagtataatgttattaaggtccttaaatactatatgcaaggagtcaaaaaggttacggttactaaagatttatgtgacagctgctgacatcagctctacacacaatttgttcaagccaaatcatcttcgctatcttgaatttattgttgttcccaccaataatatgtttggaagtcgaggcattgtaaatacctctattcctcaagctttgacaaaattttatcacctccaagtgttggatgttagcagtaaaggaaatcttgcagttcctactggtctaaacaatctcattaatttacggcatcttatcgctcatgagaaagtgcactcaacaattgctggccttggtaacttgacctctcttcaggaactaatcttcaaggttcaagatgctgacaattttaatataggacaacttcgagccttgaatgagcttgtaatacttggaatttctcaactcgaaaatgtgaaaactaaacaagaggccagcagtgcaagaatgatagacaaagagcatcttgaagagttgtcgttgttgtggaacgataacagcatgaaccctgaacctactgcagaaaaaacaagagatgatgtgattgagggtctcgagccgcttcaaaacctcaagcatctacaattgattcggtacagtggtgctacatccccaacttggcttgctagcagggttacctcactgcaagtacttcatctagagaactgcagacaatggcaaattgttcaatctcttgaaatgcttccactgcttagaaagctaaaattgattaggatgtggaacttgatggaagtctcaattccttcttgtttggaagagttggatttagttaatgtgccaaaattggaaaaatgtgttggcacttacgggctagatttgacttctggtctgagggtattgatagtgaaggattgccctatactaaacgagttcacgtttttccacaaggactattttcatgccgagcagaagtcatggtttccatctctcaacaaactcatcgtcggtcgttgtcatcgtataatgtagttttctcttcttcttgatcttgcttgttcagtacaattgcagaagtttcctacacttactttgttaaattatgttacagagcatggaagatccttccactggaagaaatgcaagcactcaagaagctggagttgatggatgtgcctgttgttgaagaattgtcagttccttctctggagaagttggtgttgattcaaatcccaaggctgcaaagttgcagagggataacaactgctccatctccacatttttcgacttcccaaggagatcaaagggaattggtatgtggtctccgggaactcactatcaatgattgccccagtttgttagtgcagtttcctatcccgccttcttctctgatttcgttcttatccatcaagggcctttcatcatttccaacaatggtgataaatcggagagtgctcacaatcgaatctaatgagttgagtgagctcgatggcaggatctcaccattccataatctgaagggcataacatgggtaaacctacggcgttgtccaaacttgacccgcatttcgatagacggtttcagccaaccacatgtcatgtcaaagcctgttcatgataacagtatacctattacgagttaccctgtcctcccatctgtcaattctctcagcattcagtcgtgtggcatagctggtggatggctaactctaatgcttcctcatttgcagtctcttgagaacttggagttacgagactgcccacagataaaacttttatcaacaagtcaatgtacaaaaatagaagcaccgaacagtttggcttcagcagagacaacctctgccagggacaaataccttttgcaaattccatataatctcctccgttctctaaagtggttaattatttgggcatgccgagacctggaattttctggagtcaatgaaggatttggaggattcacctctcttgtggagctacaaattagggattgccccaggctggtcccatcattggtgagtgaaaccaaggataattggttactcccaacatcatttcaatatctcactatcagtcctctcccggcaaacatgcagctcttcgcccctgagggcctaacttgcctcagagtgttaagcgtattttgcagccaatatttgaagtctgtgcagctgagatcctgtacagcattggagtgtctgcagttattggagtgtcaacagctgagtgttttggagggcctccaacaccttagctcccttgtaagtttggacatcgagatgaatcatgaactgtcaatggcatgggatcacaaactgcaggagcaagaacaaggcagcaatcaggttggactatttcccctgtcacttgtacatcttggtatcacaaatcttgaaggcagtgtccattctcgctttctgtgcctcccttctattacgaaattagacttgtggaatagtccagatttgaagtctctacagttaggatactgcacagcgctggtagatttggcaattgacagctgcaagtcgcttgcatcaatcgagggtttccagtccattagaaaccttaggtccttgagagtaggtgactcccccagcgtatacccatgtctgcagcttatgtcgcagcagcaaggggcatctgacatcttttctcaactggaaactctaacggttgatgatgcctctgtcctttccgtgcccctttgcaaacatctcacgtctctacgagtcttaggattacaccgggatggatatagtggcaagtctatggttagtctgacagaggaacaagagcgagccctccagcttctcacctcactacgacaacttaatttttacagttaccagaatctggagtttcttcctgcaaacctacgaagccttgactccctcgaagagttgcatattgttcggtgtccgagaatcctaaggctgccagagatgggcctcccaccttcgctcaaatacctccttttatgtggctgcagcgaggagctctgtatgcaatgcagaatggcagaaacagagaagctcaaggtccattttgttttttcagttatggtgcccatcaagttgaacggaccaggtgcgaactgttctggattttttgggcgatatgcaactgaagggatggatatactgtagcagaacaacgaagactcttggcaaaacctataattaaattgctaaaatgtagaagataatgcaatgatttaagcataatagcatgttatgacaccggtaagcacgttatgacaccggtgtatcaattttctagatccgccgctgactctttaagtatctctcaacattggcacataaactctcagaagaagagaccattttttaaagcatcttgaaaagttgcaagatgattctgttgcatcctagacattcaactgaaatgcgtaagaatagtctaccttgaaccacatgtacatttgtcttttacaagtaactagagtgttttcccacgcaatttcgtgcggagctagattttataagaaatggatttcacatacaactcttagattttgtttctatagatataattatattttgcatacaattgtaagtgatctataaccccacttctattactatacatacaattgtgttttgcatataatagattttaaaaagtagaattggattaatatatattttttatcttctattttcatagatataattatattttgtatagaactatatcaatcgatctacaccatcaaaacattgatataacataatctactggttaatattttttttctttttctccgtggtaatttataggcctccagagcaaatttcttgactggacagatgcaagtgtggactcgtgaagttggcctttctgaagaagtggagcttgagactgagatgaggagcatgtatgacgccgaggatgtcatggacgagcttgactactaccggctccagcaacacatcgaaggtggtgccgaatctcatcaaccttccattccatgattcttgcttcatgcttcttttgcatttgtgtactagtgagcttactgtgcagctaagagaagctgaataccatagtccataggctccagtcaccacccaatagtttatctcagttaattaagattaccttcccatcatttaaacttccgttgtttactatttttgagcttactatttttgatagccactaagatatatgtttctgtcaaacttttatgcttgggagatgttctagttgtttctttcttcttttttggctgtgtgcattttatgcagaggccgggggtgactcggtttgattgtatcatcttgatgtaattaactgagtttaaataaagcttccattatctaaaaaaattatttttaagaaaccttccttaattattaacagtagattgcacaactggttctcttttgcttgtcccataacattgggttttaaagagaattgcagagaaacaatgaagatggattaatctctcgagtggatgtccacccatttattgcatgtcaactaaatggttgtgaatttttttaaaaaaatacaagatagattaatatgtattatatcacttcacaaacatacaagttcaaattcgacttctataagttgtaacaaaaataaaaaattaaactctaactagtatacgcatattcacagttaaatttgttatttttgttacaacttgtagaaattgaatttaaacttgcatgtttgtgaaatgatatattacacattaatctattttggcaatttctttgaattttgttataaccatttagttgacatgcaagaaacgggtggacgcccacccgagtgtttaaaacagtttcacaagatagatcatactcactccgtcccaaaaaaacccaacttagtattggatgggatgtttttttagaacaacgaatctagataggagtatgtccaaattcgttgtactagaaaacataccatccaatactagattggcttttttttgggacgaagggagtaggtgacaacatgagctgattctttctattatcagtgatcatcgttcaacagtgcaagcatgcattatgctagatttcatttgatatgttgttgacagacatcagcgtgaatcaatcaatcccatgatcttaaaggaacttggtgtataggtttcggttcttggtgcaaccatctacacacgatgcaacatcagctgcccctgcaacggcaaatgcagacaccgcaatcagaattcagagaggaaacagaatctccctaatactatgcacaaagacaagctcaaattcagctaggaccctgatgattggagacttcctgatatcggatctcaccgttcgacgccgtgccgcagattgcgagctggcaaaaggtggcgcagtcgcaggcgacaaccttgttcttgttggggctgcagtcatccatgcacgcagatgaaccgaggtaggttcttcctgcactctgggtagagctccctgtagcatctgcagaacttcgacatggcaccaacttgatgcagttcatcacctgacagcaggctgatcatgcagcagagggccactgctgctgctctgttgccctccatcgatttgagtcctcttcctctctcagtcactctgataacttttgcagaagcagatgatgttaagttcagatcggtcacttgatcagcacaaggattttgcagaagagagatgataaaactaatgcagatggaatcaaatgtgtggacacctatgagcagcgcctaagaacacgagaggattatcaattgatgccatatccctactgttttatatatggtgtgagtgcttgactgcttgtgtttcttttattttggtgcatttttttgtacaagctttatgaattatatgagagcgatcagtatgcgacctgttttttttttgttcatttccatatgaaattgcttttctgtcccaattgtaccccggtcatataaaaaccccgaatcaaattagcattctgttttctttctacattaacccagaggatcgagatgagacatgcttaccagctagaggccttgtctacgaaaagaaagatgaagtgtactgcagcaatatgttgatctcaattagggtagcataaatgtataaatcgatcataccattgcaagtttttttggttttgtaaaccccaacagaatgttcaaagaacaatagaaaagaaaaggaagaggactgcaatgctgaggggcagacgggcagtgcgggcgatggaacaaaagaatttttttgaatgggccgtatataggccactcatcttcacgtattagtattgggctataaatgggccgacagacaagatgctcataaaatcctccaaaaagagctcagctcttaaataaaaattaaaagagtaaatatcataaaataacatatattatggtacaataagttgcacaaaatcatatagattttgtatagtgacatataaccacatgtattatggctctaaagtttcacaaaaccacattattaatcattttgactttaatctaccatatttgagttttataatcatatcataaatttatgagaattttatccatcatatgaatgttacatatctaaaaattttgatgtagaaggtcatggtgtttataaccataatttttttcgaactcacaaaaaaaattgcacgtcaatatattacaagaaaaaagcagccagaccggcttatgccagaagaaaggagaaaaaataaaatgaaaagctgaaaactttataaccataatatctgaagttatgtgctatctgtcaaaattgatatggttttgtgtaacctggatgataataggttacacaaaaccatatactccctccgtcccataatattaaaacctgggactggatgagacgtttcatagtacgattcattgtactatgaaacatcacatccaatcttaggttgtaatattatgggtcggagggagtaggtggagatttataaaatttactcaaattaagaagaaggagaagaaaaagaaatggaaggagagccggtgggagggagtgggcggtggtggcgctgctgccggcgaaccgcgccacggtgcggacgaggatgggggaggtcggcggggggccaaatttccaaccgcatcacgccaccaactcaccattacccgcctatgcgacgtgtgttggtgaaaggtgaaaacccccctctcaaatctctaagtcaacttagccgattagcgattgatatggagtaggtctgatccagctccgcggagtcgattttagtttttcttttttaaggcggagtaccatttgggttcttttattattattattattattattattattattattattattattattattattattattattattattattattattattattattattattattattattattattattattattgcaagtgtaagttggaataatcagtggttggttgtcagttaatttcccctcttgtaccatttcacgcataattccatggctgtgcactgcagaccgcagatcatgtttctttgattctcatctcctttgctacctgccttgttttctgcccataatcttccatccccttgttcgctcaagggctgttcttgctgctgcctactggggcgcgatggggttggttggcacggtagttgatgctgcaataggatggatggtgcaaggcatccttggaagtttcttcaccgggcagatgcaagtgtggtctcatgaagttgggcttgctaaagatgtggagatgctcgagtctgagatgaagagcgtgcagatggtgcttgctgctgctgagggaaggaggattgacaacaagccactgtctgactcattggatgagctaaaagagctgttttatgacgccgaggatgtcatggacgagcttgattactaccggctccagcaacagatcgaaggtggtgcctcactcttcccttcgtgtttcttgatttctgagataaactcatccctcagtttatctactggttaattgtgatttccctttcaagtaattttaacttttgttgttttttaaggaaaccttggctaattactaacagttctaagataatgtgcttaagtagttttctaagataatgtgcttaaggagtatcctcagtacggttgtatcatcttggtgtaattggctgagttcaataaaagcttccattatctaaaaaaaaaaagtagttttcttttgtttgtccctcataacaagtcaacaactggctatttgcctatgtagggaaatgttggaatgctgctgcttgtattaatcctgagggaagccgtgtatcttcatacagtccatctctttttcagcgagtaagtggcaagatgaatgaaattattacttgggtcattcatggcagaaaaaggaaaagagacgaggatgagccaactcatagcatcatgttacctcttgagatcaaacatgacatttctcagaggatcaatggaatagtcaactgtttacacattaggaacaagtctgtgcagggggttcttcagcttgagatctcccgccccattgtggtgccaaagcaaactcagagtgtggccaggggcgcacgcctgacaacctctattcccattgaacgcaaggtgtacgggagggatgcaatgcttttcgtcaagcctcagaggaaagaagtgctcctgatcaaagcagtcctagacctgtttggagcagcatcaggtctgaaagtcaacctcctgaaaagctccatcacgcctatacactgcaaccaacaacaattagatatggtctctgaactgctcccatgtaaagtcgaggaatttcccattatctacctgggactgccactatctatgcgaaaaccaaccaaggcagagctacaaccagtcctagacaagttagcaagcaaggttgcaggttggaagccaaaattactgtcacctgatggtcgactttgcttaatcaagagtgttctgatggcattacctgtgcacttcctatcagtgctgcaaatgccgaaatgggcggtgaaagaaattgaacgcaaatgcagaggattcttatggaagggacaagaagatgtaagtggaggacactgtctagtggcctggaaaaatgtttgtgcaccagtacagaatgggggattgggaattcgaaatctcgacgcctttggtcaagcgctaagactaaaatggttagccaaaagtcttgagcagaaaaatcgaccgtgggccaagtcaggatataaacttggagaagacgtggagaaaatctttaactcagctgctgaattctgtgttggaaacggcaaagacacaaagttttggacagccaattggctaaatggtggaagcattgcttggcgatggccggtactgtccacttatgttggccgctcacagctgacagtggcacaagctttaaccaacaacagatgggtcagagatctgcaaggtgcactctccaatgaagccatggcacaattcttccagctctgggatgaagtacacactgtcgagctaaatctagaggaagacaccatccgctggaagctttcctccgacggacttttcactgtatcttcagcctataaccttttcttcatggcaagagagatctgccctttcagcgaacttatttggcacatcaaagctccatcccgagtacgcttcttcctatggttggctgccaaaggtcgctgcctaacagctgacaacctgggcaagagaggatggcagcatgaagattgctgctccctctgtcagagtgaagcagaggactgcctacatctgttcgtaacgtgcgctttcaccaggagagtatggaggatgatgcagggatggattggaatcaatttcctcttgcctacagagaacgaaccagccctggcagattggtggatgaaggcgaggatggcttttcggacgggctacaggagcatcttcgacagtgttttcgcgctaacatgttggctgctgtggaaagaatgcaatgcgcgtgtctttgaacagaaatttcgaagcatagaacagcttgtgcaagatatcaaggaagaggccattgtctggaagacgacaggagtgttcacaacgtgcaatagcgagatcacgtaatatgcattgtaatctgtagaagttttctagcttaccgggtcagggcttttgccccaatctgttttcgacagcatactgtcgttgtaagctctttaattgtattgtacccttcctttcttaatgaaattggtcgaccgaacctttcggctgacccggcaaaaaaaaaaggaaaacataataaagctgttaacaagtgggaaacctagtgatctaggtgttctgccattagttggtgtcggtggtgttgggaaaacaacgcttgctagatttgtataccatgatgaaagaatcaaagaacattttgatttgcgaatgtgggtttgtgtatctgattatttcagtgaagagagactaacacacgagatgttagaggtcctgtgtaaagatagatgaggttatgaaaatataaccagttttgatgcactgcaggagagccttttagataaaattagacacaaaagatttctgcttgtattggatgatatctgggaagataaggacaggagcagatgggataagctgttagctccactaagatttaatgaagcaaatggttgcatgattttagcaacaactcaaaggacatcggttgcaagaatgataggaacaatgcataaggttgaagtgaatggcctgagtgacacagagttttggttgctcttcaaagcatgggctttttttggtaacgagaaccaggagcatgatccaactatgcagtccattgggcaacacattgctaaagcactaaagggcaatccactggctgcacggagtgttggtgctcttctaaacaggaatgttagctatgagcactggaggaaagttcagtacaaatggagatatcttctagaacaggatgatgatattctaaccatcttgaagttcagttatgaatttctaccggtccacctgcagcagtgtttctcatactgctcactgtttccaaaggatcacaaacttagaggggaaaatttggtccgtgcttggatatcacaaaattttgtggagtgcgaatgccattccaagagattggaggaaacagggaagcaatatttggataatttagttgattggggcttcctcgaagaggttgagtcacactacattatgcatgacttaatgcatgacttggcagaaaaggtttcatcaaatgagtgtgctattatagatggattgggatctaagaatataccaccaaatgtccgtcatttgtcaatcataactactgcttatgatgagaaacgatcttgcgattttcctagtagtgagaagtttgagaacatactacataagatcgtgcctttgcaaaaactcaggaccttgatgttctttggtgaaagcagcataatgttattaagatccttacatactttatgcaaggagtcaaaaggtttacgattactacggatatatgtgacagctgatgacatatgcactacacacaatttgttgaatccgtatcatcttcgctatgttgaattcattgttgtcccgaccacgaatatttttggatctctagattttgtaaatactcctattcctcaagctttgacaaaattttaccacctccaagtgttggatgctagcagtcgagtcaatcttgtagtaccaactgatatgaataatctcgttaatttacgtcatcttattgctcacgagaaagtgcactcaacgattgctggtgttgcaacttgacctctcttcaggaactgatattcaaagttcaagatgctagtaatttcaatataggacaacttcgatctatgaatgagctcgtaatacttggaatttctcaacttgaaaatgtgaaaactaaagaagaagccaagagcgcaagattgattgataaagagcatcttcaagagttgtcgttgtcatgggatgataaaaacatgaactctggacctactgcagagaaaacaagagacggtgtgtttgagggtcttgagccacaccacaacctcaaacacctacagttgactcgatacagtggtgctacatcgccaacctggcttgccagtaacgttaagtcactgcaggtacttcatctagagaactgtagagaatggcaaattattaactctcttgaaatgcttccagtacttaggaagttgaagttaatcaggatgtggaatttgatgtcagtctcaattccttcttatttggaagagttgatcttagttaatacaccaaaactggaaaaatgtgttggcacttatgggtcagatttgacttctggtctaagggtattggtggtgaaggattgcccttgcctgaatgagttcaccctttttcacagtgactatttccacaccaaccagaagttatggtttccgtctctcaacaagctcaccatcggtcattatcatcgtataatgtatttatctattatcgttaatattgctttccagtatattgcgaaatcactgtgcacttactttgataaaatgatgtttcagatcatggaaaatccttcctttagaagaaatgcgagcactcaaggagttggagttaatggacgtgcctgttgttgaagaattgtcagttccttctctggagaagttggtgttgattcaaatgcctagcctgcaacgttgcagtggaataacaacttcatctctaccggtttcgacctcccaaatacatcagaagaaattggtatctagtctccataaacttactatccatgattgccccagtttgatagtgtcgcttcctattccaccttctctgatttctgacttatctgtcaaggggatttcagtgttcccaacaattaacttatctcatggaacattcagtattgaatctaatgagttgaatgagttggataacaggatcttaccgttccataatctgaagggcttacggtcgatgtacctacaacattgtccaaacttgagctatgtatccagtgaagttttcagccagctcgttgctttagagcatttgtctatagagcactgccctaatttgttccagccacactccatgtccgagcctgttcatgaaaacagtatacttaacacagatcaccttgtcctcccatctctcaggtttctcaaaatttcctcgtgtggcatagtaggtagatggctaacacaaatgcttccccatctgctgtcccttgaatactttttattatcggactgtccacagataaaattgctgtcaatcaaccaaccaacagaaacagaagcaaccagcagtttggcttcagtagagacagcctcatctagggatgaacagattctgaaaattccatgcaatctccttcgttctctaaagtggttgcgaatttgggaatgtgcagacctggaattttctggagtcaatagaggattttcaggattcacctctcttgtgatgctacaaattagggaatgccccaagctggtatcatcattggtgaccgaaacaaatgatactaatgtattactaccacagtcacttgaacatcttgatatcggtcctcttccagcaaacctgcagtcctactttcctaaaggcctgccctgcctcaagaagttaagcctaaatagcggcgaatatttgaagtctgtacaattgcattcatgttcgggtttggagtatttgcagatctcgcggtgtccacaccttagtgtgttggagggcctgcagcacctcagctcccttcgaagattatgcatccagatgaatcctgagctgtccgctgcatgggatcttaaactgtttcctctgtcacttgtagaacttggggtcagaaaagtcgagggcagcttccattcccgctctctgtcctgcctcccttctatcacaaagttagagatacaggatagtccagaattggtgtctttacagctaggatactgcacctcactggaaaagctagagattacaaattgcaagtcgcttgcttcgatcaagggcatccagtccattagaaaccttaggtacttgaaagtactcttcgcccccagcttacctccatatctgcatggggtctcagggatctggtctcgactggaaactctccagattagtaatgcagctgtgctatccacgcccctatgcaaacagctcacagctctacgtgagcttatgtttttgggtaagcagggggagggatatgacggcgagaccatggtgagtctgacagaggagcaagagagagcgctccagcttctcacctcactccgagtactagctttctcccacttgcagaatctcaagtcacttcctacgaacctacaaagccttgactgcctcgacgagttgtatatcagtgtgtgtccgagcatcctaaggctaccacagatgggcctcccaccttcgctccgttacctatctttgtaccgctgcagcgaggagctctgtgtgcaatgcagaatggcagaaactgctaacctcagggtcggcatttactctgcatcggctattcccaggcctggttatggtacatattcctatgcctgattatgttgcaactgcccttccctaatctagagttgatgctgtctgcatatgcactgagtctgaaacaactacacatgtatctgcatttctgctgtgcaaatgctatgatatagtcaaaatgatacagttaaagcttgtgtgtaactccaatctttgctattgttgtagaaacatagaaagcagcactattcagttttgggtcttttggcaagtccaacctgaaaggcgaaggaagcatttcttcctagtaagtttgaagaggcttctgcaaggatgcatcacatcactcagcactcagcgggcctcaacacttgcctctcatgctacattggagtactacatataaggcacaagatgcgtaggatatgctactgcctcacaaactgcatttgtacgctgtcttgcttgttctgaaagaagccgtcatcagcggtaagcatctcacactgctgtaatgtgactgtccatgcatttgacttcatctacatcttctgccacaatacttaaattattaagagtattaattatgcagcatcaagaatttggaaataatctctgtttgacttgcattccttagctaatgggctgtgcagctagcagggagaagaatggaaggggagaaacatgcctcggtggctctgtaggatggactgcctggagggctgcgccatcaggtttcttgagttcatgactgctctgattagcataagtggtcgccatttcatattttccacttatgctcagtcgcccacttctctagagtaacagaaaataagaaatggcgagcatcatgtagggtcgtggttcaaaaagtagaagtagaattttctccttcttaatacaatgtttggttggcaaagccggcccggcgaaaaaaaagtttttttttgaaaggagggcaaaagctttgcctcgtatattgatagagatggagaaaaaaatacagagcgacagaaatatgtacagggctagtctaaagaactaaacccgtaaaaagagagagttaagtgatatctcccaaaattccaaactcttgaagctttgaggctcctaaaaaaaagtagaagagttgaaaaaacattaacagaattataacagaaccagctggggaatttgtatgagctgttttttttagttgttgacaattgtttggcagtggattattgcattacaatggattatatttgttcatgactgattgatactaatttgttccatgatcttgtaggtacctggtatagacttcttggtggcttggcgcaatcgtctacacgagatgtaacgtcatctgactccggtgccatctgctggctgctgcagatgatcaccggacattaggagcatgcagcagagagcagctgcacctgctctcttgccatctattcagctcctctcactcactgctgcagaggtagaagatgttaagattcggtcaatcacttgctctgcacaagcattttatacaaagataattcacaaatggatgataccaaatgcatggacgcctatgagaagcattttagaacaagggataagtatccaattactctggtcagctcatgtagtagcctgtagatgttgccacgctgccgcccatggttatgtattgcacaagctttggttcggcttcggcctgtctcctcccaccaagaaatggcgagcgtgatgcagaatgtaggtggataatacaagagaattggaaataaattgctaagccaaataggtatactaatatgagctgatttacgaaatcttttcatttgtattattttgctgataatcatttaacagtggacaactgcacgcagaatgtatcggtattggttggtaggccgtaggcctataccattcacaacccatgtgacggtgtcccatggaatagcattcctgtgtcttcacaagtacatatctattagcagcgcacatatggtgtaccctgccttgcctgtcctcatatggcagccagcctgccagccatccatcgtcaaggtcagttccttgaattcaggtctgtctagtttagtataagtggttgtcgtttcgtattttctgcttatgctcagttgctcagtatatagtctgatggtttttatctcagcgcatttcgtattttctgcttatgctcagttgctcacttccctagagtaatggaaaaataaaaggcatgagtgtgatgttgatcgtggatgaaaagcagaagagttgaaaaggcattaaatactccctatgtttcatattataagtcgctttgacttttttcctagtcaaacatttttaagtttgaacaaatttatagagaaatatagcaacatttccaacacaaaacaaacatattcaatgttatatttaatgaaactaatttagtgttgtagatgttgctaattttttctataaatttactcaaatctaaagaagtttgattagaaaaaaaaagtcaaaacgacttaaaatatgaaacggagggagtaaaacttagcaattttatggacttgcagggacatcaacataaccaaatgagagataccatgggctgatttttttagtcactgattattatttaaagttgtgtgaaaaactcttcataataattgattgtgcattacactggattcgatctgtttatgatttacaccgtcattaattagttccatgatcctgaaggtactcgttgtagagttcttggcgctgtcatctacacaagatgtaaagtcatctggccctgctgcagctgatcattagacagcaggatgagcatgcagtggagagcaactgctcctgctctccgtgtgaagcttgggtcaatcacttgttctgagcaagcattatgcaaagagaactgacaaatgtagatggaaccaaatacatgtacacctatgagcagcttaaaagaaaaagaaagaagtacccagttaatctggtcagttgatatgtggtaccctgtacatcacgccacacagcagccaatggttatttatggcgcgatgtactctgttttttttttacttcagctgcatttttttttgtttcagaatattcacttgcatagattagtatgaaaactgaatttctttctcggtttcaatatgtgagttgcttcagacagttgtacgatctggagtcctgtggcttctgtggagctaacataacacatcgaatgctggagagaaagcaagaatcagagatgagatgtgccagtcagtccagccaagccatatgccctggaatttcaatcagtgcttggtaagaggatgaggtaaggacactaacctgccaagaaaatattgttcgtgcctgaagttttctcagaattgagcatgtcgggagaatctgaacaatggtggttgttgctttgtagtctggagctcaggtgggcattgggcaaccatggggaggaggagcataatgcaggtgctggccagatttttctgggcttctgatcgcttccatgctgagttgagtcgttgcaagcatgtctccaagctctcaagtttgcttcagatgcaggaatgcataagcagaatagtgaagaaacatactccctctttttatgacgttggtcagttcaaaaacattttgggatggaggtagtatgtttgtaatatcgatattggcctatatatatttgtggacgacaaccactgattcttttgtcagggaaactaagtttctgctatcttgtaatctcattggtattcctaatctctgagtgtaattcagtcgcccatgaatgaattagctcatcagtttattggagcttacatggatccggcaagtgtcttgttgtgactggactggatattgtgaacaatgtttcagctttttggtgttctttttttctttcaaaaagaacagattagtgtaagatatggccgatgaattagagattcgtatagtcgatgagatggtgagatcatccagttcgttggtgcaggcagccggacaaattcatcatcagttgttcggatttgctaatcttatacggcgggcgcccgcgacttgtgttgctaacgggcgcttctctgcactgcagctatttggtcaccgtgctcgctcaaagctgccgcgaatggccaccgaggaatgaaaccctagttcacgcccaccggggatgctgcgactgcgaatctgcgattcgtcgcgcggcgttctcgcgggatccaccggtggtgtggtggtggggattccgcgccggcgaaaatctccgccaaatggactggttcaaaggttagatccaccttttctgctatttcatccttcagtccaagtgaaagctgaaaaagaaatgaatctgaaaccggatattttgtgtaggattggtgttttacttcaacagttgcgactattggttggatcatggattgggaggtccgaatcggctgttcattgtaccctcggcccctgtgttggcaaggtcatgtgatacatacacaggtaggagtaacactcaaaacactgtgtgctgattaggtgatctacaagttgcctcctcgactactagaatctatagtgtgtgttcacttcactgaccgagttcaggcctagttcggtcattgttagcacttgctttcacgaaattggcacaaagccgtgccagtggcagagctcgagctcgacgggtattggtggaggccatgtccttgaagccttgtttggatcatggactggcagaatcggtttcattgtgcgctacgcatgccgctctcttggctacatatgttcaggacttcagatcagctccgagctcgttgatacataatggaggtaacacgtgatgtcgcaacaatctttttccctctgcttatgtttcttaggctcaaaagatgaactgctgaatcatactcagcgaccttatcatcttcttatcctcaacatttaggcaacagcatctagtagttggtatgtaacatcacatgcttagattttctgcatggtcgatgtcacagtttgctccactagctcgtaatcacagactcacagtactaccaaatattacaactgtggagccaaagaagacttgacttgcagtctcccatcggctgtgcagactacacatcattcttctttggctcttatctcatttgctccgtaccttctcagttgatcccatcttctttcattgcgccactttcgtctagatccatcctcttgtgcaagggttgttcttgctgctgctacaacctccttaggtgcattggggaacgatgggattggtttccacagcagctgaggctgcaataggatgggtggtgcaaagcatactcgggagtttcttcacaggacagatgcaagtgtggactcgtgaagttgggctcgacaaacaagtggaggagcttgagactgagatgagaaacatgcagatggtgctcgcagaggctgagggaaccaagattgataataggccactgtccgagtcactggatgagataaaggagctgatttacgatgctgaggacgtgatggacgagcttgattactaccggctccagtgacagatcgaaggtggtgccaaatctcatcaatctttcattccatgtttattgttttctaggagcatttcttttgtatttggctatgcaactaagagtagccgaataccatagacatcaccagtaggtttgtctcttggttaagtgcgaatgtatgattacctttcccttatttcaactttgatcaactacttttttattaagaaaacctttggttatttattagcagttgtaagataatgtccctttttctgctcaattatctttatcttgcttgtccccataacaacatgtagtttccttatccagggaaaggttctagtgctgctgcttgtactaaccctgaggaaagctctgcatcttcatccactccatcttacattcaacaaataagcaacaggatgaatcaaaatattagttgggttatggatggcaaaaaaaggaaaagagaggaagaggaggagccaactcatagcgtcatgctgcctcctgaggttaaacatggcatttctgagaggatcaatggaatagtgaatcatttacgcattaggggcaatcctgtacagggggttcttcagctagagattttacggcaaattgctttgccaaagcagagtcagaacggacccaggaaatcacgcctgacaatttctcttatgactgaacacaaggtttacgggagggatgcagagagggacaacataatagagttgttaacgaaggggaaatctagtgatctagatgttgtgccattagttggcgttggtggagttggaaaaacgacgcttgctagatttgtatacaacaataatagaattgaaaaccattttgatttgcgaatgtgggtttgtgtatctgacaatttcaatgaaaagagcctaacctgtgaaatgttagaccatgtgtgtaaagatagacaagagtacggaaatattagcaattttgatgcattgcagaagatccttttggagaaaattagacacaaaagatttctgctagtattggatgatatgtgggaagatagggacaggaaaggatgggaaaatctgttagctccattgaaatgtaatgaagcaaccggctgcatgattttagtgacaacccgaaggacatcagttgcaagaatgactggaacaatgagtaagatagacgtgaatggtttggatgaaacagagttttggtcactcttcaaggcatgggcgtttttaggtaatgagaaccaggagcgtgatccaactttgcgatccattgggcaacatattgctgaagcattaaagggcaacccactggctgctcggagtgttggtgcactgttaaactggaatgttagctttgagcactggaggaaaattcagtacaaatggagatctattctggaacaggatgatgatattctagccatattgaagctcagttatgaatttctgccagtccacttgcagtactgtttctcatactgctctctgtttccaaaggaccacaaattttgtgggaaaaaattagtccgtgcttggatatcacaaaattttgtgaagtgcgaatgccataccaagagattggaggaaatagggaagcaatatttggataagttagttgattggggcttcttagaagaggttgagtcccactatgttatgcatgacctaatgcatgacttggcagaaaaagtttcatccaatgagtatgctactgttgatgggttggaatccaagaaaatttcaccaggtgttcggcatttgtctatcataactacttcttatgataaagaagaacattgcaattttcctagcgaaaagtttgaaaaaattatacagaatatcagatctttgcaaaaattaaggaccttgatgttcttcggccaaaataacacaatgctattaaggttcttacatactttatgcaaggagtcaaaaaggttacgattgctaaggatttatttatgtgacaccttcagacatcagctctacacttaatttgttaacgccatatcatcttcgttatctggaattcattgttatctacgccaggtcaacatatggatatctagacattgtaaatacttctattcctcaagctttgacaaaattttatcaccttcaagtgttggatggtgatagtacaggcaatcttgtagtacctattggaatgaatgatctcattaatttacggcatcttattgatcatgaagaagtgcactcagcaattgctagtgtcggcagcctgacctctctccaggaactaacattcaacgttcaagccgctggtaattttagtatcggacaacttagttccatgaatgagcttgtgacacttcgaatctgccaacttgaaaatgtgaaatctgaagaagaggccaagagtgcaagatttatagataaagagcatcttgaagcgttatcattcacatggaatgatcttagcatgacctctgaacctactgcagagaaaacaacagatgatgtacttgagggtcttgagccacaccataacctcaaacacctacagttgactcgatacagtggtgctacatcaccaacctggcttgctagtacagttacatcactgcagggacttcatctatataactgcagagaatggcgagtcgttcgatctcttgaaaagcttccactacttcagaagctgaagttggtcaggatgtggaacttgatggaagtatcaattccttcttatttggaagaattggtcttagttgatatgccaaaattgaaaaaatgtgttgggacttacggtcaagatttgacttctggtctaagggaattgatggtgaaggattgtcctcaactaaaggagttcacgcttttccatagcaacctttttcactcccagcagaaatcatggtttccgtctctcaacaaactcactatcagtcattgtcaacatataatgtatttaccttatttcttgttaatcttgcttgttcaatatagtttcaaaattattctgcgcttactttgcaaaatgatgtttcagagcatggaaaatccttccactggaggaaatgggagcactcaaggagttggaattaatagatgtgcctgttgttgaagaattgtcagttccttctctggagaagttggtgttgattcaaatgccaagcctgcaaagttgcaatgggataacagcttctccacctctacagttctcgaattcccaagtggatcagacggaatgggtatctagtctctgtgaactcaaaatccatgattgctccaatttggtattgccgtggcctattcctctggtttcttacttatccatcaaagaagtttcagcatttccaacactggtgataaagcagagaaaattcactataaaatatagcgagttgagtgagatggatggcaggatctttccgttccataatctgaagagcataacatctatgagactagaaaattgtccaaacttaatatataattggagcgaagctttcagccagctcatcgctttaaagcatttggatatatcaaagtgccctagtttgctccaacgtcatgttatgtcagagtttcttcatgaaaacactacacctgatacaaattaccttgtcccatctctcaaatctctcaaaattttctcgtctggaatatcaggtagatggctaactcgaacgcttcctcatttgccatcgcttgaggactttgagttgcggaaatgtccacagataaaattcctgctaataagtcaatctacaggagaagcaaccagcagtttggcttcagcagagacaacctcagccagggatggtcagcttctgaaaatgccatgtaatctcctccgttctcttaagcggttatgtatttatgattgtccggacctggagttttgtggaggcaatggaggcttcggaggatatacatctcttgtggagctacagatatatggctgcccaaagcttctctcgtctccggcgaatgaaatggacataagtttgctcccaacgtcaattcaggagctctggataggagacttgccgtcctttttctcccctgaaggcttgtccttcctcaaaaggttgtggctaagtagcagccaagatttgaagtctctgcagctgcattcctgtacagccttggaggatttgaatatctggggccgtcaacagttgggtgtattggaaggcctgcagggtctcagcctccttcgaagattgaacatcgagatgaaccctgagctgtttgccgcgtgggctctcaaactgcaggagcaagaacaaagcggcaatcaggttggactgtttcctccgtcactcatagaacttgagatcagtaatcttgagggcagcatccatccttgctttttctcctgcctacattctctcacgagattagagctaggggatagtccagagctggtgactctacagctgggatactgcacggcattggaaagtctaacgatttacgactgtaagtcgcttgcctcaatcgagggcttgcagtccattagaaaccttaggcgcttgacaacacgtgactcccctggtgtaactccatgtctacagcttgtgtcgcagcaggaaggggcctctgggatctggtctcgactggaagttctatgtactgatggtgcctctgtccttaccacgtcactatgcaaacatctcacatctctgcaatcccttgtgttttggtcgcgatttaatgatgatgagcccatggtgagtctcacagaggaacaggagagagccctccaacttctcacctccctccaacaacttgaattttccaaccaccattatcttgagtcacttcctgcaaatctacgaagcctcgactccctcgaggcgttgcatatcaatgggtgccggagcattcgaaggctaccagagatgggcctcccgcccttgctcacatgccttaatttaattggctgcagcaaggagctatgtttgcaaggaaaaatggcacaaacggagaagctcatggtctacactgcctgatcgcgtaacacttctgtcttaaggtacatttctgtcttaacaagtaatcgatgcacttacactttgcttgcttaaaagtagattatctttcagcagtttgagtcagtatggtgtatcactgccttgtctgacatcgcgtggctgctggccatcgtcatggacttagggtcgcttaccttgagttcaaggctgtcagagaaagctaaaaaggggacatcacgtttgctctggagacttcgaaattatcatgttaaatggtgaaaaaaaggtaaagatctacaccatctgattgtggtgggtttagatttaatggtggggattggtcgaaatagttttatacttgtattacataaatagaaggttgtatatccaaatatgaaatagaccatgagcttctccgttagtgccatttttccacataaatagaaggttgtatatcaatttcccacacaatttaaataaatttcctacacaatttttaaatatactttaatctagctcagtgcaaaattgtgtgggaaattcagttagtctagcattagcgaccaccattttgtattttccatttgttttcctcacttccctggagtaacagaaaataaggaatggcaggtatgatgtagtttggatgaaaaatataccattttgattttgcaaatgtgggtttgtgtatctgataatttcagtgaaatgagcatagcgcgagagatgttagagtaggtgtcaaatataaccagttttgaggcactgcaggagacccttttggaggaaaattagaaacgctagatttctgcttgtattggacgatgcatgagaagatagttccaggagcagtcgatcaggtgcaatgagctattaactatactgagaccattttcttaaaaaaaaagctatattgagacgtaatgaagcaaaaggctgcatgaagtggtttcagtttgttattgtccgcttataatcaatttcaaacttcactggagtatagaaaataagaaatatatcgagttatatagattgtgaatgaaaaattacaagatggttgaaaaatacattaacacaacttagcagtggtatggacttgtatgggcattaacagaaccagctgggagatagcattgagctgactttttatttaattgtttataattgtttgacagtggattattgcattaccctgaattcgttctgtttatgactgacatcaaaattaattaatttcatgatcttgtagtacttggttcaagttcttggcagagtcatctacacaagatgtaacttcatctggccctgctgcagctgatcacgagacgacagtatgagcatgcagcagagagcagctgcacctgctctcttgccttctctctctcagctcctctcactcaccgctgcataggcagaagatgttaagatcgggtcaatcacttgctctgcacaagcattgtgcaaattgagttgacaaatgcagatgaaaacgaaatgcatggacacctgtgagcagctcatgtgatagcctataatcatgccacgccgctgccagtgttagtttatatctctatgcgtctgctggtttttgttccagttcatattttcagaagcctaaaagaaattagcatgaaacttgagttttctttcttgaagatgaccctatgtagctccacttttgatatattgatgactggttctttggtcagggaagttatctcataatttcattgagggcttgtttggttcataaccttgccaaccttttggccttgacaagagttgtccgttgccaaaatttttggcaaaatttggctaggcattcatttactttgctaccaaagttatatctggcattcaactaatccaaataatttagtggtgccaaattgtaagctacaaaccaaacatatcacaaactttttggcattaccaaaatattggcttgcttaattttttatccctattcttggagtgcaattcagttgtccatgattcatctcggtctggagtgccatgctgttgccagtgactgactcggtagtcggtaccaacgttttattttcttcttttggaagggagcaaagcattgtttctcctttgcagctttgctggcgactggctagcgagtgtccaagcctcggtcttcgtccttcacttggcgaagtgtcctgttcggaagagagttgctgaaaaaaggggttcgttggggtgttggtgaggggagttgtattaaaatccttacggacaattggatccctggcttcccgcttgttacctttgccaagtgaggttactgtggccttcttgatggacgatgtgtccaagacatgggatgtagacagagtgaatgcttttttttgaagaagaggttgccagcgctatttttcaggttcccatcagtcgacacggaggggaggactttgcttcttggccacatgacaagctaggtcagtacactgtcagaaaacctcgtcatctttcctagctgcacatagcagtaatggaagaggactcccatcagttctagatgaaactgtcaagaaagggaaggctctttggaagattaaggcaccaggaaagatgaagataaatctgtggcgtgcagctcatgactgtctgcccacgggtttccaactcagacgacgccatataccagcaatggagggatgcatcttttgtaacagggacgatccaattgaacatgtgctgcttttttgcccctttgccagtgctgtgtgggatgaggtcaggaagtcttttaatctccaactgggtcgggcagcactgagtaatatgaagcaatggatttttgactttataagccggggctctgagctacagaacaaggtaatggtggtcacaatctggcacatttggcaagccaggaatgaagcgaagaacaacaactcccctgtgaatccacgtagagtggcgcaatcagttgtggcatatgtgaacatgcttactcaattttgtttcaatctctgtcctgctcccaggtgtgagtccccctcttcagttgctagatgggttccaccgccggcaggaactttcctcatcaacacagatgctgctatcttcaaatctacttgccctctccattgcctgggaagatggtatccaacgggtaatcctggcttccgactgctcttctatcatcagaagaatacaagcctgggcaagggatcgttcttcggttggttgtgttgtctctgacttcaaggttttggcttccaggtttttatcatgctcgttcaagcatgtgaatcgtttatgtaatgctgcagctcatgttttagctcgtcgggccgagcttaatccttgtaattctcaccgtggtgtcatcccggattgcatccaggatgttctatgtaatgatgttacttaatcaatgaaatgctgcattcatgtcaaaaaaaaaagtttaacaagataaacgcctccttgagaaggaattctatagattatagctgcaaaatttgaattgattctcgtcaaaaaaaatgctaaaatttttgtaaaattcctgcctttcaaagcgccacagtgtaagataggagtatagtcaatgaattagagaccccgtacagtacagtattcgttggatgatgctggaaaaatctcttacacgtaaaatagaacggctcattatattagttctagctaactttttaaaaataaatagattaatatgatttcttttaaagaaatttccctatatatttatttttaaaaaatgagatagtatgtgagttaggaacgtcggctgcttgtctgtactgcgctgacataagtaaatttcatcatgggctattttctttttaccggcgtttcactttgggctagagctaaatcaagattttcactttacaccatgtttctttgccaagaattgcactttggggcagggtatgttcacaatctgggtatgtgcgacctcaccgtagatattctgctgttgtggctcttcgccatgcgacagctatgtatttcgttgtaatggtgatgttcgacctgactggcggcgtccggtccaaccggggaggatgcacgtacgagcatggcggcggggcatggcactcagttcaaacaacttcttgatacacggcgtggcacgaacgccttaatttgacgagcatcttgaggcggccctcaggaagtatgaactactccccagtgtaatttagcttagcttgattgctggtcaccgcagccagcgagagggactgtcatgatcaatcggatcatgttgccgcgttgcacgggacgatagtgagttgaagcaaaatgtccaccgcgctgcgctctcaccaggacatggcggcgtatggtcagctagttcacgctcgatctttaaggacgagccacgcgcggttgatacatacgccatcccgctgatgtacagccaccgtcgactgtctatcgtcggccaatattccagcgtgtggtgtggacgctacactacccatcgtagaagaagatgtgtgctatcgtttcatgtatgcagaacttcctttgcatatctaggtgttgccacattgcaatcatctctattgcaagcttgccgatgcccacaatccaatcatctccatcacaagcttgccggcgtcctccctgctctctcttttatctcctgatctactgacatgtgagagtagtacaaagtgaaagcttttggtaaaagaaactagcccaaagtgaaaactttgtctttagaatggtccatgttaaaacttgggtaaaaataactagaccaacgtgcaatttacttaaaaaaaaaggaaagaaaatcagtccttggcgcgcgccactccgtcgacctcgtctccctcagaatcggcggtcggcggcgtctgctccactgtcaggcaatgcaagcatctaccgcatcttcctctcccggattcgctaatccggcgggtgccccgcaacttctcttctaccggcctctcctctccctgcagcgagctattcgtttgcacagtgctctctcaaagctgccgctgatggccacgggtggtggggattccgcgccggcgaaaatcgccgctcccgtccaatccaaaatggaaatattgcagttcctattggtatgaataagcttattaatttacgtcatcttattgctcatgagaaagtgcactcagcaattgatagtgttggtaagttgacctgtcttcagaaattaattttcaaggttcaagatgctgatagttttgagataggacaacttcgagccatgaatgatcttgtaatacttggaatttctcaactcgaaaatgtgaaaactaaaaaagaggccagaagtgcaaggttgatggacaaagagcacctcaaagagttgtcattgtcatggaatgataacatgagctctggacctactgaagagaatacaagatatgatgtgcttgagggtcttgaacctcatggtaatctcaaacatctgcaattaactgggtacagtggtgctacatccccaacttggtttgccagtaaagttacctcgttgcaggtacttcatttagagaactgcacagaatggagaattgttcagtatcttgaaatgctcccactgcttaggaagctgaagttgatcaggatgtggaacttggtggaagtttcaattccttcctatttggaggagttggtcttagttaatatgcctaaattggagaactgtgttggcacgtacggtatagagttgacttcccgtataagggtattgatggtgaaggattgccctcaactaaacgagtttgtgcttttccacagggatcattttcatgctgagcaaaagtcatggtttccatctctcaacaaactcatgataggtcactgttaccgcataatgtaaactatctattcccatcaatcttgctttagtacaattgcgaattttgttgtgcacttactttgttaaatgatttttcagaatgtggaaaatccttcctctagaagaaatgcgagcgctcaaggagttggagttaatggatgtgcctattgtcgaagaattgccagttccttctctggaaaagttggtgttaattcaaatgcggagcctgcaaatttgcagtgggataacagcttcacctgtacaagtttcgacttcccaagtggatcaaaatgaatggatatctagtctccgtgaactcactatctatgattgctccagtttggtagtgtcccttcctattccgccctctcctcttatgtcttactcgtccatcaagagactttcagcatttccaacaatggagataaacaataggaagttcactattgaatctgacgagttgagtgaactggatggcaggatcttatcattccataatctgaagggtgttacatcgatctaccttcgaaggtgtccaaacttgactcgtatttcaactgaaggtttcaaccagctcatcactttagagtgtctggttatacaaaagtgtcctaatttgttccagctacagatctcagatcaggcaaataatacttcatctgctacaaacatccctgccctcccatctctcaaatctctcaccatttcatcatgtggcatagcaggtaggtggttaactcaaatgcttcatcatgttaactcccttgagaagttggacttatttgattgtccacagataaagtttctattaaccaatcaacctacagaaagggaagtaaccagcagtttggcttcagcagagataacctcagcaggggatgaacagcttctgcaaattccatgtagtctcctccattctctaatgtggctctccatttctgaatgtccagacctagagttttgtggtggcagtggtggctttgcaggattcacctctcttgtgcagctacagattaagaattgccccaagctggtctcagcattggtgagcgaaacaaatgataatggattactcccaatgtcacttcaagatcttagcctcagtcctctctcagtctcagaaaacttgcagtccttctcccctgaaggccttccctgcctaagaaggttaagcctatgtaggagccagcatttgaagtccatgcagcttcattcctgtacatccttggagtatctgaaaatctcgggatgccgatccctggttgtgttggagggcctcagctcccttcgaagattggacatccagatgaatcctgagctgtcagctgcatggcatctcaaactgcaagaacaagaacaaggtggcaatcaggctcaggtgtttcctccatcacttgttgaacttcacatctcaaatctcgaaggaagcatcagttcgcaatttctgtgtcttccttcagtaacaaaattagcagtgcgagatagtccagccttgaagtctattcagttgaaacactgcatgacactggaaaagctagagattatcaactgcaagttgcttgcttcaatcgaggatttccactcaattagaaaccttagatccttgaaggtacttggcacccgcagcttatctccatatctgcagcaagaggcctctgggatgtggttccgactggaaagtctaatgattgatgatgcagctgtgctctctgtgcacttatgcatacagctcacatctctaagaatcctacaattctggtctatgggcatggcgagcctgacggaggaacaagagagagcactccagcttctcacctccctccgacaacttggtttctcgcggtgccagaagcttgagtcacttcctgcaaatctacgaagccttgacttcctcgaggtgctacgtatcgatgagtgccggagcatccgaaggttgccggagatgggcctcccgccttctctcagttaccttgatttgtacggctgctgcgaggagctctgtatgcaaggcagaatggcagaaacggagaagcttaaagttgagattatttacaaacagtgaatcgatccctgtaagacactccagaggtacacctttgtttcccacgagtcacatatttagatcatctttcttaagatgtactgcagcaatgccagtcaccgtatgttgtaatgctgccttgactgacatttcagtgttgctgccagcatcggtgtggtcatcttgcctgtgttcaaggctgcctagtctagattatttctacttataatcaattgcaaacttcgctagagtaacagaaaataaggaaattgttagtgtattcttcttgctggtgacttgacgtttgtcatataaagatctctaatgtgtacttgtgctaaaaaaatcaggatgcaaatggactagggatgagagcaattccaggagaggattactgtcgaattgtaatacagtacccaagcgacacagattctaagtgggtaagttgcacatgtgccgtgtaatttccttctggatgcaggccttccccatttcaattgtagccagctcctgacatagtttgcaaaggcctcttttaattattgcttgcatcctagcttatggttctgaaaatcgccattagcgtgtacaatattcctcgcatactcgtgccaccttttgtgatgcatgtgtttgttttcttagttcttaggcactgatatttgcagaaagatccaaaaactggagaacctgaaggtttatcatttgagttcaatctctgtgaagctgtagcctcatgggagcaggttagcattcattcaactgacatatgtatgtgatttttacagatgtattgaagttcaacattatatgatataacgcaaaacatggcgatcctcagtatatcacaaactatgatgccttattgtccagatgtttgtagatcacagtattagttattgttatggacttatggatcacagtattctatttagttattgttatggactcatggtcactcagttgttgttttcctaggtctgcaatagcacaacaatactcacaaagctgttattacagtgtcgacatgtatggatttacagtagacccaggatgcaaggaatggttggtgctattgatcttacgtactaaatatgatgtatgttgatctgcagatcttcttacagttgatgtgatgatctttcaggatgaggtacttttcggagtccagaaagggacacacttcactacatgggagagcatattatcaaatgatggaatgtcttggtgtgagtttctcatttcccctaatccgaactaatagaaccattcctacatggagggattattacttagccacactgttatcgtgtgaagagattgacttgttgatttcttaaagaaaagggtaaattggagccatgccattataattttgcaaagtttgagatatgccattggtatatcaatgacatgtagaacccacatgagtcaatgacatgtgggtcaggatggtatatctcaaattttgcaaaatgtgcagcttgtaaaaatccactcacctatgcgaggtgatcctggcagagtagtaaagtggcttccaaccaaggacaccattgaagctgctagggctgcttctgagaaactgttgaagtaagttttgtggccttcctttgtttagcatgattcttgctcccagttgtcaagcactccatgtccatggcaactctacttaggggcttatttactggatgttgatttccatctgtttggttttggtgcttgaattaactaaattaatcagatacaatatcatcacgccacaagttgtataacttgaaacctcctcgttgcaaaatgcactataggagacctggagctggaagcgagggccctttgagctcttgcaccatgataaagaagctcgagaaagtgaagacagcaaaaagatccgttgtccacgatgctgccttgaaccacctggagtacataagaggttccaccaggtaccctctggagcgaaatgctgggggcggttacttctgcatgatcaacgacagatagacatatagccgcccatattccacatgggacatagaggatgaggaaacacaagcggcagcagaattcatggtaccttgaagcagaatgctgtacccggacgaatcaatcctacacggacaaactattttgagggaactttggtgctcatttttgtacagagccggcagttgagatgattttaaacgcatgagtagtcacaatggttgtatcctacgtggaatctatgcaagtgttgtgtgatggaatgaacaaatagctgagcagttggctgtgcgttcatcggatcgtcaaatttgtcacctgtaacttggagaaatcttaactatgtacatggagcctgtaatttggttggcgtagatatgtactatttgattggcatcacattctgaaacttgctgtatgtctgaacttgcataactttgttgaccaacaaacttgctatatgtctgaacatgtaccaaatattaggttcctatatccatcacaagggagagaaatttgtcaaatttccatttccataggcctttacaccgttgtatagtaaatgacagaagtggatcaatggacgtgctgttctttgttgcagcatttttacggggatatgtaagatacgtatttttatattaagaggaaggggatatgtaagatacgtatttttatattaagaggaataaaagttagatgcccatttttgtattaagaggaataaaaaaacaaaaggaggagtaaaggggacaagaactagaatcttgcaacacttcacaagcctattttcacagcattaattgacaaccacgatatctattttcacagcattaattgacaaccacgatatcacttggagctagatgttgatagatggtactgatatcatttggagctagatgttgatagctggtactgacgtattggtcaaccgtcatagtgtcgcagttttagaacattagagatatttagtggccctcctgacgttgccgctcccgcagcagaagcagttgatattgccgttgcgctagccaccgcagctgcaatagttgttactgccactgcttctccttcggctgatgctgcggctgctggcgtttgatgaatggcagaaaatatttgtcatcatacttagaattttttatttttgactttttattttttaaaattttattaatacaccttttcaaaaaatattttcgaaaaatgaaccttttgccacgccagacacggtggtgtggcaggacaacactaccacgccagctacatgtggcgtggcaaagttatttggccacgccagccgtggccaaaaggatcagatttagaaatactttttggagtgatgtattactaaaattaaaaaaaattatacttgaggacccaaagaaaaaaaaattatggaaagttccctaaagttcataaagcactcaactatcgacgtgtagtctcgatgggttactagcaaactatctacagtcatatagcatacatcaagcaagtaaagtaaaatttgagattaatcgaaattaattggtttaaatatattctcttatggatttgaatacttgaaagatcaatcatatagtgcatttagagttttttttgcaacatatcccgtgtaatataaaaacacaatcatttctttgcctgggaagatattaatgatcctattgtgtgatataagaaagcgaggttgcctttttttctttgttttggattttttttttcattgcttaataattttggatacactatacattctggaattataggagtggtatcaagtaggcgtattatatttaaataaggtaagggaatggaagttcgtgtgattgggaagggaaagatatttttggaaacctctagaatccatatgtgatatttttctctagatttttttctcacatatgattgttaggtttttttcttctctagtataaattcatgatttttcttcaatgtaaggggtgccacatggaccaatcaaaaagctaacaaaagagccagctttagattattagataactctcttgcccttatcttctttctctaacttatccatatccagtaaagtctagaaagtcacgctggcaatagtggcccatgcaagcaaagtttttcaacgaactctcttcctccctgcctcctgcaacggcaacgacaggatccaaggaggcggcggaaagaactacatcagcgcaagtggtggggagactctctagatctacaatgtgccgctttgatctctctacctctaccgctctacaagtgacaacaagcgtcaggcaacatgtccatggtggtgacctactagggtcggtgaagagtagtaagagcattcacagtgcgtcccacacatttaaggagctttagggtgccacatagaaaaaggtaaaccggagaggagagacaagggatagcaaggtcgtttctcacttgtcgccacgtcagtttcctgagatgacagctaagaatgacaaaatttctagaaaggggcaattagaaacacttgagtgagtctagatagcacataacttgataaatacttaggtaaattaacaatcccatatattatctttctgaaaagaatgtatcacatataagaaaagaaatgatttatctaagcccgttgtgaaataaggaaatatgcagatcacttatgctcttctcttataagcatctcctgcttactaccgaaagaaagttccatcccttatttcctttcttaacggattgtactaccgaaagaaagtttcatcccttatttcctttcttgaaccggattttcttacgttcatctagtcttaagttattaaccggatgactaacgtgtttggtttaattgagttttaattattataaacttaaaaaatggatttatttgatgttttaaaacaacttccatataaaagttttcacacgaaaagcaccatttagcactttaaaaagcatgctaatgaaaaccatgaaaaaaatatgcatcttaatagaaaaagaatggccccgctatttttcgacctgttttcaataaacgttgtatatgtgctcggttaatcctgctttttcccccttatggtagttaagaacacaatacatatcatggacgaaaattttacacaatacaaacacacatctccatatatattgcatgcttgaggttaaactttacataatgcagaagctatccagcttactcggcaatcagctgggagcaataaacaacaagcctgtaaagtggaacaagggcatggcaacatccacaggctatcacattctggaaacaaacatgaaagatgcctgcactcctggagagatggagcctagacatctgcatggtcatggtgaggcttcagatccatttcgacctgatgaatcgtccattgcatgccctccagtttctgcagtttaaattggttgtcaatgatgcatcaaacatggtactcattgataatgatgaagatgagtcaaattacctttacaatctcatggtattgccttgcaattacatcaaagtgtggatctacaccttggtactcgcgcaaccgtgaaacctggtgcaagataaaacgacactctagaatgtaaaaacaaattatgggaaagtcgactccttttcaggtaaaagaggatactgaaagatggcatacattgtttatagaaattcagttgaaatagataactacagagctctagttactagatttccattacagagttaaggactagatattcagtaaatgagtaataaccattgctattaaggatttaatgaccaaatattttgaagattacaaggggaaagtaagatgggtgtatcataccgcttcagtataagaattggatgcttctttcgtggcctctactagatatttcctgcaagaaacggtaaataagtaaaaaatgcattttcctgaaaagaaaagcactcaacatattggatctgttttgagaagatgtaccacttaactcaagatatcatgtcagttttttttaaatcaattaaactggctttacctgatcctatgtagtgccggtactgtttccttggtataggtgtcacgcaagagatgatgctcaagatagctagaaccatgttaagaaagaaatagttaattaactctgttttgtcccatcgctgactagcaaataactcaattagaagactaactatgtttaacaaagtacaaattaagatccgttattaggtgatgtatgatggacgtagatgcaggtaccaaccttaatttagcattcattgtccggcaccttttaataagccaagtcttcttcagatcatcctattagcccacaaagacaaagtaggaggattaactatatgaaactgaaaacactccatgttttcaaagaagcagcatcataataggaatatgagaaagcttacatattgatgctgatgttccaatttcttgtctttaacgaactgtataagtacagcaagaatttgctccaggaccttttgaaatttcaggagccatcagtaagtggatataatccagaatttctactagaataaagtgagctaactggctatgtggagtttgagcaatcacttaatatctacacacgtacattatagtgttcggcaaattttctatccatcgaagcaagatcgtctagtagaagggcctcttccttttcaatctcttcaataattaacttcaccctgccaaaagggaaaatcatattgtgagtaatgcgtctcatgaattccctgttattaatattttaagtccaaacaagtaaaggttgacaattggacattgccatcaagaactgagaatgcactgtgagtgatcagagtaaattattacagaagcaaacaaggagattttttttcactcaaaatgttatgcttgacctaagagagttttggcatatcaagcatttccgtataagtaaaaccattgcaagacaggcaaagatatgaaatttcacctttctggaagtctggcacttgaaatctgactaatggatgatgaatctgcagcacatttgaaatgttaagctaaaacaataatattgaatacaagatgtgtactgttgtctaaaactaagttgcccaagttgcattgcataaaatggacaggaacgcagggagtgaaattggtagtcatagcaagattcaaaaactgacccctttcatccattgcaaacagatcagctaaagcatcacacttggcttctaagcgggcctcaatctctcttgccagagttcgttgatagtcaaccatgtcctgcaacgggaaatcagaggtacatgctgtaaacgtttaaacagcccggttttgaaaagaaacaatgtatgtcctgattgctcttcagtaaatggtaaacaaagataggaagcagtgaagcagtaattgtctgattccccaagaaacatacgataatatatccaaaactaaaatgaaacttgaacccaccaacaactggttcacacgataaatttggttgcaaaagattatacataccacggtcatggctggctgctcttgctgcacctggtagagataatccgatgtgattccaagaaaacgatcaggaacaccgccaacaccaggctcaactggctccgaaccaccagtaccaggggccgcagcaacagtggctgcacttgcggtgctgctgtagttattgtaactagtcgagattgaactcgagctaggtgcggcacttgtcatggtgctatcgaatgagctcctagacaaggtgctcagcttctctatctcctcctcatgtacatctccatcctgcgagagcagtggaagccttaacctctgcgcagcctctgcaaccgccaaatggtgctccaatgactcgtacacctacatcagtccatacaatgctccattttcagtcagataatttctcaatttagcagcaaaagtttcatctgcaatcaaccagttgaattcacatttgcagctttatgtccaccattcactgaaagacgcaaaaatttaaaaatgcgggagagaagtggaacctgcggggagcagttgagcttcttcccagcgttggcgacgccagtggagatggcgtgctgatactcctccaccatagcaatggcctccgcgtacacagcctaaccacattacccccagatctgatcagaaccccaacgggaaaccctaaaatcccagatcccacgagaagggacgggcgcactcaccagtgcctccaggtatcgcgcgcgctccgacgcgacctcctcccgcgcctgcggcgaaggaaagcacagagacagcagcgggtgagatcgcggaggtaggacatcgagttcgcggaggtgagatagcgtacctggaggaggtcggagtgggcgcagctggagaggagggaggcgtcgggggcgaggtggtggcgctggagctgatccaccaggtgcgccacctccggcggcggcggagggagcgacgcggcggcggcggccttggacatcgtcgtcgccggcgaataagaggttcgttggtggtggtttgaatcgtgtcggggaatgtggggtttcgtttgtgtagccggatttgggggggctaccagccgttggatcgtgggatgacggatgagattacggctgattcattcggctatcagagacacggaaacaaaaatgcctctataatcttctgaaattatggatgtccactataatctccttcatcaaattcgtcatctctccggtctttcatttcatacgctgtttgttatttttatttgccgaggccaaattttaaaatttttaagaaaattagaattgagagttgatttttaggggtttttcatcgtggttcattttaagttgacttaaaaaaaacctgtgaacattattatttttatgcttagttcttttttccatggcttatgagccgtaaatcaaacaatgtgtacttcgattttaaaatgagatggtaaatcctagtactatattttagaaacagatttaatggctaggtttcgttatgctcgagcataccctcaaatgtttgcataaaaatttaaaatagatgatatctctttgtgattggtgttggagaaggattatagaaaagaagaacgggtgtttgctcgtcctggaagaagaacataagcaacacaatgatatgattagaactgaaacggtataaattaaacaacttactccctccgtcacaaattacttgtctctttaagatttaaactttgtctcaaaatggttatcataataaaatactatttgttccatcaatcgtttctaattcaaatttatcttttttcttgcccctaaccaacctcctacatccaaccatacaatatttagttaagggtattatagttttttttcttaaatcttaatctatgctttaaaaaaaaggtaaaattgtggcacatcaacgtgcatgagcttaataatttgattagatcaaaataccagcccatatccccatacacatgtggtcaggtagatggacgaccttcaagtttgttgttttcatgttcaggcttgcatgatacgattacgatctgccatgatgtctttttctcgagattatggtgtcgtagtcgtcttcaactacagtaaccagacttttatgacagaaaatggtgcgccaaagcagccataccatatgaggaaaggaaaaaaaagatagaaaataaaacacaatattgaataacttgcaaatattgtattgtataacaagatttgtccttggggaccttttattatgcgtataattagcgtgttttttttcgaaagtatttttatcccgaaaagagaagcactagaaaccaaatttcaaaggaatgcgacaagatttatgatgatagccttactggagaggagcatcatgaaatcatcgtgaatgcgacttgaattgaattattatgctcatcgctttcgcataacctctgtaggagtacaattctttactgtactaaccacttttgattaggagtaggagtactgattttatttcaggataaatcaaagcaaaaggaaatatatgcaccttgtcgggtcatcgtggctgctttgatgatgcactcatcaccttcacacgtcggatctaagagaaaaacggccactaaaatgcattatacaattctaataggaattctcccagtcgaatttaagagagaatttggtctcgaactctcaacgaatgaaaaaaaaactctgtttgaaacgacttcagttttatctttgaaccaagtagttgtctaaaatagcgacggataaaatgtttgtgcaacaaatgtattattactatctcttttctacacgataaagatttcgcatgaaaattgaatgtttttctagtattctcccgtttcatattataagacctttgctttttttttctaatctggctttgttaagtttgactaaatttataaaagaattaataatatctaaaataaaaaattagttttattgaatccaacattgaaatattttaataatgtgtctgttttattgaaaatattactatatcttttacaaatttaacttataatatttttaactaaaatgaaataatatgaaacatagtgagagaggtgagagagggagtagtaggtttggagtggataggtgagcctgaacatgaatgagtcagcgacgagtggaacaaacatgtggtgtgctgctgccttgtcgtcatagaacaaccttctcttcccttccctcacctttcgcgttcacctcagctcagctcgtctctctgactctgatctcgccgtcccgagttcgccggacacgcacgcacgcggccacgacggcggcgatggagggcgccctgctctgcgccgccaaccacgcgccgctcacgcccatcaccttcctcgaccgcgccgccctcgtctaccccgaccgccccgccatcgtcgcctcctcctccgggctcacccgcacctggcgggagacgcgtgaccgctgcctccgcctcaccgccgccctcgccgccctcggcgtccaccgccaccacgtggtaagattcacctccgctcgccaccgcaatttctacagtaacttgattctcaccattgattgattgggttttctccccaatctccccctctttttcaactgtttgttcatgctaaaacccccaaatcgcttcgaatttacttgtaatttgattcggaattagcggtcgagtgattcgcatttttctgtgtaggttgcggtattcgcgcagaatattccggcgatgtgcgagctccacttcggcatcccgatggccggcgccgtcatctgcacgctcaactcccgcctcgacgccgccatggcctccgtcctgctccgccactcggaggccaagctcatcttcgtcgactgcgcgctgctcgacgtcgcccacgacgccatccgccgcatctcccaatcgggcgccacgcctcccgtcctcgtcctcatcagcgagctcctcgacgacccatccgatgccaagctcccgtccggtcgtgtcgactacgagtacgagcacctcgtcggcaatgccgggtcgtcgccggagttcgcggtgcggtggcccgccgacgagaacgagccgatcgcgctcaactacacgtcgggcacgacgtcgaggcccaagggcgtgatctacagccaccgcggcgcgtacctgaacagcctcgccgccgtgctcctcaacgacatggcgtccacgccggtgtacctgtggacggtgcccatgttccactgcaacgggtggtgcatggcgtggggcgtcgcggcgcagggcggcaccaacgtgtgcgtccgcagggtcaccgcggccaccatcttcgacgccgtggcgcgccacggcgtcacccacatgggcggcgcgcccacggtgctgagcatgatcgtgaacgccacggcggaggagcagcggccggtggcgaggagggtgacggtgatgaccggcggcgcgccgccgccgccgaaggtgctgcaccggatggaggagcaggggttcctggtgatccactcgtacgggctgacggagacgtacggcccggcgacggtgtgcacgtggaggccggagtgggacgcgctgccggcggaggagcgggcgcggatcaagtcgcggcagggggtgcaccaccacggcctggaggtggacgtcaaggaccccgccacgatgcggagcgtgccgcgcgacgggaagacgatgggggaggtgatgctgcgggggaacacggtgatgagcggctactacaaggacggcgcggcgacggcggaggcgctcgccggtgggtggttccggtccggcgacctggcggtgcggcacgaggacgggtacgtgaaggtgctcgaccggtccaaggacatcataatctcgggcggggagaacatcagcacaatcgaggtggaggcggcgctgttcagccacccggcggtggaggaggcggcggtggtggggcggccggacgactactggggcgagacgccgtgcgcgttcgtgaagctgaggcccggcgcggcggcggcggcgaaggcgggggtggtggaggaggagctgatggcgtactgcagggcgaggctgccgaggtacatggcgccgcggacggtggtggtggtggaggaggggctgccgaagacggcgacggggaaggtgcagaagttcgagctgcgggcgcgcgccaaggccatgggcaccgtcccggcggcggcggcggcgaagtcgaagaggagcaagctctgaatgaatttgtttgcgtcagctgctgacgactgcaatgcaacttcgatgcagcatgcgtgtgtgtgcctgtggaatctcgagacaacaaccaaagaaaaaaaataaaaaaatcatgatttgttgtgatgattcgtgcgagaacaggttggtgtcctttggctgtcagtgtgccgtgcggttttgacagtatactgtcatcgtgtgggcttgccatatgatgtggtaacctcacacggtgatacattttcggtttttgtcggtaactatacaattagggccttcactgtgcgaatacgtggcgagttacttcgatacgccagctcggagattcgtagccacgtctatatcagtcggcccccttgtgaagagcggcggatctcaatgaagttctgtgttcctggtgctgtcaagattataatcgtgggccctgtgctgccaaagtctaattcaaggtcatactacctccgtccaaaaaaacaaaaaacgaatatggcatagtattttagcacagtgaatctggacagatgtatgtctagatttatattactagttttaggatatgtcacccagtactagttggttttttatgggacggagggagtactgcactatgactaatatgttgatcggttcttagattgaaaaggtggttcgacgcacgatgctttgactatggatggccttatcatgtattcgtattgaccgtgatagtgtttggtagtggttgtctgtactcaaccaaacttatcctatcaaccatttcattttgatttagacatggcatcagaacaacctgaatttcgcttatgtacatacgttgcttttaccactaaaaggccggtttgaacttaaacagagtagcttgtttatttgaaacatactctcttcttcctaaaacaatcaattttttatataattcgttcacgtataaagttgtctcttactcaaattcacgtataaaagttgaattttttttctgtaatagaggaagtatgattttatattagggttcttgtacagtttaagcaccgacaaccgctatctgtaactgcaaagggaggaaaatgagctagcttttatacatgcccagctcattgtttggcttatttaaaaaataaacccaacggtatatttgtaaacgaaaactaatttatgaataaaacttttatatacatgttcttaacaatctaaaagtaaagaccgaaaaataaactacgataaaaaaatctcaaaatcaactttaaatttaagattaagaatttaaaaaaaaattaaaatttgagttataagcataagcattagctaaggctgtcaatgtggctatgagagcgagacagtggttgagtgacccattgagctgggcaaacgatggtgcaccgcgaacgaaccaaacgcctagtacagccatagcccattttggtgttgtgtcgccaccaaaggcgattttttcctccttttttttttggtaaatctggagagcgactgacaaaggggggacgcggccccgactcggcgactccgaccgacgagatcgccgtcgctccatcccccatggctgcctcctccgccccacctccccctccccgccgcctcctcgctctcaccatggcgctcgccgccgccgtcgtatccgccgcctccgccgcgagggccccggcctccgtcaccccgatctcccgcaccctctaccactccaggtgcgcctccctcccacgaacgaacccctccctgccgtctactcttctcgggggggtttcgattcggaatttgggggtgatttcataccatttcgaacctaggtcgatgccctgcttcagtatactatacctcgtggttgacgaatcgagagagtgtccctgtttgcttaggtatcatttgctgctgcgcgtgatttcactgcgatttgttctcgttttccccctcattaagtgtagtctcagattggtgtggtggccattgctttgtataaacggcatcatacatcggtcctggcaccactaatgtggtggtttctaggaaaaaaaaagaatacgattctttttattttttttcagcaagtggtatactggcaccacaagcctgtatcttaatgcaaacgtttgcaggcctagttgtgagcatgtgagctgatctgaattttgtacgagtgtgttcaaccttgcattgcttgcttgcttgagccggtctgatgaggagcatatagatacaatgtatcggctttttgattctgtctcctgtgtgcagagcatcatgttaactgttccttttgtttttcctcttcagtgattcccttctgagtgatatcaaggccttggttgcccggcatccagacaagttgagtgtgagtggtttaactgccctatttcagtcattgttggccagtttgttttgttgcatactagtgtttcttatgaaattttgattgaatcgttgcagatggataccataacagcaagtaacaaagggtattccacagacctctttatcgttacttttaatcatgccaaggagagcacgtccaattcttcaaagatccatgtccttctggttagtttccaacagaaattaactcacgctggatcattctgtgcacactaagttatttcttaccactaatatttatccattgtcccaaagcaaatggtatttgtttcactgaaactgttgtcatttccaacctcaattaagagaaatcccaaagcaaagcaaaacaaaaccaactttttgataatttttacacattggcttgtaaattaaattattgatgtcttgcggttttgacagaaaggttcattgtcttccagagctttgggcagcatggcagagagcttatcacttctgaagttgcattaaacctcctctatattttgaccgagaagcggaaaattgctggtgtcgatctatcatcctttgagaagatactggagaatcttgtaatcaaagtacgtccttttgtaacttgttttgacattttcacctcctgacccacataatcattaggagatatatcaatacacatgctcttttctggtatgctctgcatggaattactagagcttaagggcagtctcatttattaggaataaagtataagatagaccaaagttagttatttcctttaagccttgtctgattccatctttgttctattttgacatattttttttactctctttgtttaaatatttagtgcagtgaacacgacaaaattatggtttaaacgtcattactaaatgtttcacctggcatatggtgtttttctcctaaattactctatgcgtatgtcattattctaatatatacaagcttggtttggcttgctaagtaaaatatttcatgacatgaagttcttagggttgttaacctgatccatgctctttagtcttcttaacttgttgcttcctcttcccctcttttcatttttgttattttttatatttctatattaacgaagaatcagatttcttaataatcagttatgattttttttaatgtggctttgatctttaggtggtgcccatggaaaatttaaatggtcgaaaacgtgttgaagaaggggagctttgtgataggagaaatggtgatcaatcttatcttgtaaattcatcacttgatgcagttctatgccaacttcctatattcatgtttttttcatttttcaggaagaggagttgatcttaatagaaattggagtgttgattggggaaagaaggaaaaggttgttttctcagcagtttattttatgcacagggaaaactgtttccttttgacttactgtagtgtgcatgttgattttactgaattgcgtcttaagctaattacctaaattcatatggacaagaccgtagcattccctaaacttgctcgcttgctaccattgattgacatccttactatcttagaactatttttaatttagatctatagagaatttagaaaatagacctctgcatatgctatggttcattaccatgtatcttagtttgtcatccttggctgttactacgcctgtatatggtatggttcagtggttcactatcaatttatcatatgcgttaattgctgattgttggattacttaacctcagttatgcaaatgtagtgtacatcatatcaatattttgagctatatatgcattttacctgtattataggactacgacccatatgaggaaaatcctggcactgctccttttagcgaacctgaggctcagatcatgcgagagctatccaagtcatttaaaccacatatgtgggtgaatgtgcattccggaatggaggtaagacaggctattgtgttttgttgttttccatattcatcatgtaatagagaccattgttcgtagtgcatcttagccacaataagatagcactttgatcctttggaaagaagctacagttaaatatgtaccatagtcacctaggacttgtaaatgctgattcctaattttaatacggttattaggatagcaatcaatctattaaaatgcataagaaagttctaaaatctgttattccttatagtgctacacagaactatacatatcttgatgagttactcactgttgctttactcatttcatctattgttaatcataggccttatttatgccatatgaccataagaatactacaccaaacggagcatctgctcatttgatgaggacagttttggagaatttgaatcatcgccatttccaagatagctgccttgttggatcaggtggtggagctgtggggtatgcacatctaacaagttgcccaatttgtcagttttatcgtgttttttgttagtgagcgtcctaagttctatgtaatccaactagggatcatattgccagcaactaacaatgtgtatgcctttatatccacctgctttctaggtatcttgcacatggcaccacaactgattacatgtacgacattgtaaaggtgcctatgccctttacctttgaggtcagttaatctgtttcctgaacagtcaattcccaagtttatgaagctgtattgaaactatagggatcaactcacattacttgtattcagatttatggtgatgagaaagcatctaccagcgattgcttcaagatgttcaatcccgttgacaagacaacattcgatgtacacaaatcaagcatctctatttctatctttattttttggaagacttgttcctgtatacttttagagttatgcctctgatttaacatttccttcgttgttgccagcgagtcattaataagtggtgcatggccttccttatactttttgaggaaggactgcgaaacctgcgtgaagctcaattagtatcccaaggtgcagtggataactgggtcccaatgggaggagacattgttgagataagtgcggcacgaaagagcagtcccgataagaggaaacttgaaggccttgaccttggaatgcaggaactaagaacctactttagactattcatgctatcaacagtcctgctgatgttcatgttctgttcgaggatatcaaagaacaggaacagagaaacaggtaacatttttgactcctgaaaacccataaaaaggaatagattgaagctcgctgttcagtttgagtttcggatttggttgtggcaagagtgatcaccatttgttgcctcagatgaacaaagtgcatgaaccattcgaactttggaggaaacttatgcggtttaccgcttggagatccaccgatttgggaggcgacatggctggcagagttcagaatggcattgtgcagtctatgtttagatacgagatgcatgtcgaatgatttgtttttaccttcaacaaatcatactagctgtaagttgtaaagctgtccatatcagttcattgtgatgaataggcattccttcactttttgaaggctagtgcacaaacaacatcttgttaacgttgaatatttgacacaattaaatgtactattccccttctcgaatgatttgtattgtcatgagctgcttcattacggaccagtgacgtttgtatcccgacagcctgagcaaacctttttttttcccagaaaatcactcaagtttaacatcaatatgcgtgttttttcagtatgtttagaacacttgttaaaattcaagtctcgcaagaataagaatttgtgaaaagattacgacagaaaggcaatacgctctatacaaattgttggcaagtgtcaatgcaacgttgcaacatactttttgcacatcttctgaacgaagatttgttgcaattatattccattttccacactctcacgaaacagagatgagatgggagcatccacatctttgaaagactgcacatttcaaactgatttgagttagacacaggttacaggtgcttgatgagaagccaagcaatgaccgcaagaaacactatagcaacgacagatatcagcagggccatgcacgagcagccacctttgacgcgcttattcagaatagcaagcctcttttgcacgcgctgaatcaaagaaagatttatgtcaaaattcagttcgcataagcttgaaataactatataacagtgaaactttcctgatgattgtataaagaagtaccaaaaatatacctgaagacgtgagtttgtaacatcaacataatcatccaaatcatcctgcaaaaaccacaatagatcagttgttatcaagtgctaggaacataaattcatatggttttgtgagaataaactaacaatcaatcttgtatgcagggtaagttcttcattgactgctagagcaatatgttttgtgctcagtactgtctcttccagcttctcaagaccctcatcttgttctgcggattgttgcaacaggcaagataaatgaattagctacaatgcaataattgtttcccgtactaaaagctactgtttgtaaccatctagatatatacaagtaaatacaaaatgcaactctgcgaacagatcgggccacttagaatatatcaggggtgctttacttcacacattccaatagaattccaaaaaaaataaattaagagtgatgcatgaatgataataatagaaacaagtcatgcgttagtacctttcataacttgcctctgaagtgaaacgattccttggttatccaaaccagctactctactcatatcatcagctgctttcttactctgaccaagcaaatcctccctaaaaatacaaacaaagatttccattaatatgcttctgaacaaattgcaacatgtcaaagcatcaaccagttatctttatttcgagagaacaaggcaaataactgtatcaggctaccaggttgatatctgagaacaagaacagacctgtttgcaaagtttgacatgttgaaacttgtagccatctgctttgctctagatttcagatttgaaagcatgtcttgtcgcttatgcaactccttgtccgtgctgcataatgagagaacagcatgaataccagtagcaatctttttttttcactagaatcataatcccgaattgccgataatccctcagatatagggagaaatatcgaacagcatctactttaatgaagtctcaacccaggcacacaagagtaaccaactctaatttagtgttcgatccagaaggtgaatcacaagggtgaaaagtggacaggtcaacgtgtaagggtaacaattctaaatgaattcgatcgcggcgtaagttaatcaggggaccgacagattccataagatttgtacaagctaactgtgattccatcaccaacatatgaacaacccatattagtacgcaaacagaaattaagtagtagcagtgttatgaaggaaggaaggaagcaacacatgaactttggaggaatcctggacagcaacgcttctaatttatctcgtaatgaagtctcaaccccaggcacacaagtgcaaccaactctaatttatctcgtatctctctctccataagtttgatccagcaggtgaatcacaagggtgaaaagtggacaggtcagtgtgcaaagagtaacaattctaatcgaattcgattccgccttaagttaaaccaggaccagagacattccttaacatttatacaagctaataactgcgactccaacaccatcaatccatcatatgaacaacccatattagtacacaaacagaaaataagtagaagagtggtatacatggacttgggaggaatcctggacagcaaggcctcgaggctatcgagcctagtcccgaggatggttatcttcctccgaatggccgaggtgtggcgcatgatctccggccccgactgcgggagcgaacccctatcggcgatcatggaggtgacgtcatccgcgagcctggacgcctcgctgtactccctcacccatggatccgaagacgacgccattccttccttcctgcccacccaatcaactcaaaaccatcaggtcaccacctcacaaaattcatcgaggattcaattcaaccccccaaacccacgagaatcatcgattcccaatagatatctatccctaaatggttaccgatcgggaggcggagagcgcgaattgaacgggggagagggaggggggatggatcggagaacctggcggatcgtatgcgcggtggtgcggcggcgggattggggggctggattgctcgtcggtggattcgccgccggcgagtcggcgacgccgcgcgattgcttgcgatttgcttgctttcccctttttggtgttggtgtttgcttcggctggttaatcgctttgacccaagttatgattgctctctgcctatgcgtgtgggacccaggatgaagataataatattaaataatacttttttgatttgtttgtttgtttgtttatttatttatttattcggcagaggagaaaagggatttttcatggctgagatggattcaagagcgagatgacgtgtgcggttggtacggtgattcatgtgcggacacgtgggccaattacgtaggagttgtataggtgggccgggcccaaactagccttttgttgtgactcaaatatgggccgtcgaatgtacattgttttatgaagagatggaaactatggaatgcagagttgtacacttgaaatcacagaaatgtttagaagtacatctttcatctcaaaataaaccaacatcgtacatatcctagtacaacaaatttatacatagagcaatcccaaaataaattaatctcgtactaaaatgtgatacatggatacccctatcatatagtggttcaggacatctctctttcaaggaagcagctgggattcaacttccttgagggtaggagtattatgaaagtatgttaattgtaggttatcaaaaaccctagaataaatccttccagcgtcgatgcacgagcggttaatggggacagactataaattcgttgacgatatgtctacgctggttcaaatccagctcggccaaaaaatctagggctttgtgaatatgagttagtccatatatcacatcttagtccgagattattttattttaggatggagggtgtgttaggagggagtatgtaacactagtaaggtcccgttcttttctccaacaagagttggacgaaaattaagattttcgtggcacgctttttaaactgctgaacggtgtgtttcgtgcgaaaactttgtatatgaaagttgctctaaaatatcatattaatctattttttaagtttataataattaaaactcaatcaattatacgttaataccacatcattttacgtaaaaaaaacttaatcttcatcttcatcttcagaagaaaagaacaccacctaaatcttatcaaaaaccatgtataataatataatactgcatccttttaaggttataaaactttctagcattgcccacatacatatagatgctaatgaatttaggcatataatgtgaatgttatatgggtaatgctataaagtcttatgctcgaggaataaagtataaagtcttatgctcgaggaataaagtatttagcaacatgctatagcaagtaacagtatgtacgcaagaaacagagaccagctaactactgcctattttgaccaccaccaactctgcatacgccgacacaatgcatgatgtttctaattcgttcgtgcatccatatatacacgcatcatggcggcgggcttgatcgcctgagatacgttgatagtccattcaaaatgaacatattagtaacaaataataatgtgtgaccaagacttctatatgcatcttattagctgtttaaaagccagtgaataaaaaacagagtacgataaataaaaattctaaaaaaaacaacccgaaaattaagtcatgaaattcgaattttagctacaactcatcaacgtgttgacattttcttgcattgaccttctagtcgtactaattatcatgcatacaaccatacgcgtaccaaccaccaaccgatcgttcgattttgtagtatcatcagaaaaaataagatcgttcgattttgtaaggacaaaaagaaaacaaatattgaactaattattgcgtgtttccgaaccttcgatacttgttgatattatatgcaaaaacaattataaatcaacccagttgttggcccatgactcaccagattggagacttggagtgtacaaatgtgcagctcagcagcatggtcaaaaatattcaacttgtatcgaccgctcgcacatgaaaatcaagcaaactgacattcatgcatgtgtgtgcttagttgcttacatgttggatatataaaattaaaccgtatgatagcccatatgtaggttggtctggtaggaaggtctaaatttgcaatgtacgatcaataattttttcagtctcgttttgaataagattaagatcaaacttttctaatttcgggcctgttcactttgatgaaaaaaaaacttaccaaattttggcaatggatttcttatatagttaccaaaatttgacagcaaactaaatgtagccattttttttagcaattttactaaaatttgataaggttgaaaataataacaaagtgaaaggcctttcgaccataataactctaaaagtatttaaagtaatagtgctagaatacataaatttatattataaaatactaaaataaaaaattaaaatatatttattatgtattataataaaaaaacataagttcaatattattttagagacgatattgttgttaagaataatatggaggagtggtcatctgaatgatgatgagatcacgatagggagagggggccgcagcatgtgcatgtgccaccgtgctccttttctaattaaaatccacaaacattgtggcggccacggtttctgaatccacttcagctttcgtacagttatttaggccaagcagctgcagggcggggtgagccccagagagaactctgtttaaatgagactaaaaaagtctctatcatattagatgtttggacattaattataaatattaaacgtagattattaaaaaaacccattctataaccctgaactaattcgcgagacgaatctattgagcctaattaatccatgattagcctatgtgatgctacagtaaacatgcgctaatgatgaggacatcctccactattacccgctggcaaagacgcaaaagtcggacggcgaccgtgtgagcctctgaataatcccaccttacttagcttggtaggaggaagccggcgaccgtgtgagcctctgaataatcctactttatttagcttgggagaaggaagccaccttaaaagggagagctacccttctcctattggactagtcttttagggagattgggcctttcctccagtgggtgtgcctatgaactgttggggtccgggcaaccttaagttattgggctataaactaaattgttggggtccgggtaactttaagttattggcctataaactgttggggtccgggcaatcttaagttattgggccttagccaaccccacctggaccagattgttatcagctaattatagattaattaggcctaaaaaatttatcacatgaattagctcatatttatataattagttttataaataatctatgtttaatactctaaattcatctgatatgacaggactaaagtccaaacacttgatgcgataaacatgcatgtgcaatgcccgtctacacaaactgtgcgtacttactttactagttgttccatttgctatagacaaggttaccattcgacgattgattactatactggaaattgaattaacttgctttcaagaattatttcttaccatagatggccgcttatcatactactttcctacgaaggttcccatttctgtgccacctcaccatttttgccaccataaacacactatcacaagataaatttttcctattgtaccttctctgagggaaacattctatcagtgtgatgttgtgtctgcagtgatatatatgcgtacacatttaccgtgtaataaaaataaggaagataaatacactgccataatactatttatgtcctgtattacaatctactccctctatcaccaaaaaaaggcaacattgtactaagatgtgaatttggatattctctacagtatgtccagattcatcctaatgtgtcacgtcgtagtatgaggttaagttttttttagacagagggagtatgtaatactatttatgtcctaaactatgagagattttacatttacacttggacaatcctaggactactagaataaatcatatcatatcctagatttttaagttatttttgaaaagaagggagtaacaaattattcaaactttaattgcctctaaataacagttccatccccatccaagctttgccagtcaaacgacgacgactcaaacgcgatctcgacggaaaaaaaaaagcaccagtcaccaccaccattagtctcatcaaaattattcaaactatagcacgactggtttatcagccaaaggacatgcatgcctgcaggacatatgctaggaacagcatgccatttccctttgttgatctaaaacaataaaccactactattacagatgactacactagcagctacttctactgcgaagccgagtttagagatggttgattgtaggttcatatggttaaaacttaaaactagcagtaattaattaaggggttatttagatggcagtcaaaataaaccttaccaaattttgtaagatggtaatattatcaagttttggcacgattcttcatgtacttaccaaagtttataaaaaactaaaagcatgcaatttaggaacttcaaaaaaatggtatgatttaaattgatatcttaatttacacaataagagcaagtttaataggatagccaattactggctccaaatcatctatagctaatccaatagcttattcatacaatagttaaccatagaaatattctacaccattaatatcacctctcatacacacataacattttagagtctgtgttccagctggctataaatctgtagccgctttcttttctctcttctcttttcttctcgatatgttgtgattatagctggcttatagcttttcctgctctaaataagtaatataagagcaggtacaatagcaggctataaaccagctgcaaacatattttaaagagataaatcaggagagagaagagcaacgggctatagatttgtagccagttgtagcacagactctaaaacgcagtgtgtctatgacaggtgggactagatattaatagtgtagtatgtaactattgtatgaatgagctattagattggctatagatgaattggagctagtagttggctatactattgaacttgctctaagggtaaatagtagtaggaacagtaaatagtaaagacgtgggtcattaaaggccgcatcaaagttgtcgccgggtcgtcccatcctccctcctccgcaacgcaccgcgccgcggcacaacctccccctcttcaccacctcgcccccctcacatcgcgcgcccactactatttgccgccgccgccgccgccatgagctagcaaccgcccacgccctcgccctcgccctcgccctcgcctcctcaccgcagcatgaagcccgggggcgcggcgtcgtcggtactccccgccgcgcgcaggggcggccgcatcgccgccgtgatcgcgccgctgctcctcttcctcgcggccgcgctctccttcccctcctccatcggccgcatcccgtcgctcgtcgcgctgggacggaggcacgctccgtctccgcccccgccgccgccgccgccgcgggtggccgtgtgtttggtgggtggcgcgcggcggttcgagctcacggggccctccatcgcgcgccacgtcctcgccccgctcgtcgcgcatcagcaggagaagaaggaaggcgaaggcggcgcgcccgtcgtcgacgtgttcctccacagcccgctcgacgccgacgcctacaagctctccctcctcgcccgcgccgctccgccgggatccaggctcgccgccgtgcgggtgttccggccggagcgcatcgccgagacgcccgagcgcgcccgcgtgctcaccgccagcaactcgcccaacggcatccaggtacgcgcccgccgccgtttcaatctccgatcacccccactactccatggttggatttggtttggtttgttccttgcttccgcatcaaaccacgcacgcacgcatgctagctacctccccgactccgatcgaacgatagcttccccgcacgttgcgtcgttttcttcatccttagacttgcttgctgccgctgcatactcctcattgcaatttttttccctacacattgctaattgtttatcgattttttgttgggtgttctgtttgttcgtcttgacttgtttgtcgcctctgctaatctgtccacgttgcttaatttggagataatttgtttcaacctttcttcttatattaaaaaaaacatttaagtaaaaaactacctaataaagtagtaaaaccacctgaagttaaaccgaaggtaggtgatggtggcaatggcatggtaggggcaggttgttgggttcttctctttaatctaggggcggtttcatttctctatatccttttaatttattaagcccttaattaggtccaaaagataattaagattgataacgtcttcaaatggaggaaaagaaaccaagcaagattgaattggtaccagtttaatcaatttgcatcttattatctaccgcggaagtcgcatgggaattgtatagagccatcatcaatttgttaatggcccattggccagccatcgggccatgcatgcatgtcattccaaattcacggatctagtcaaagtgtcagctagacagcggccaaattcgctactgctagttattttttttaaatgagagctcgttgcccacagctagcaaaaatatcaatcacaatcaccgagttggttggttctcaaaaggcatcaacgcgttgggaccataactctcaattgttcataaggacgaacactacagtagaatcagcacaagaaagcaaattcagaattcagaagagaaatcatgtgcttaacagtaaataaatatccgagtcagtctttggtccaagcaaggtaagcaaggttggccaagtcgtcgatcggatgattgatcacaaagtcattgttcctttcgtagacagttcggtacgtgtcaatcaatgacccgtctctgactcgctctgcactgtgtaccaacaaaaaaattgtgtcgtgttttcgttttttgcactgtgtccttgtgaatgttcggcggaagctacgaactgaataggacattgccgtgtgcacatttgattttcactgtgagacatttgtcacaatgtacttggctagtactgtgacaaatcttacgcgggtgcacccataggactaccagtacacgtaggtataaggcatgcacgtcagcacgtgccacgactaccatgactgatcccaatccgatggtagtttctaactgtctgtgtgcttaactaccacgattaattagtctagtaatttctccgttacaatgcaagactttttagcattgtacacattcatttaaatgttaatgaatctagacatgtgtatgtgtttagatttattaacatctattccctccgtttcacaatacaagccattctatcatttcccacatttatattgatgttaatgaatctagacatatatatctatttagatttattatcaatatgaatgtgaaaaatgctagaatgacttacattgtgaaacggaggaagtatatatatatgtggataatactagaaagtcttatattgtgaaatggagagtaattgagtattattgatcagcctgaattatccatgagatgctgtgtgtgtcagtgttgatccatggttggttggagagagactgaggggggcaaattaaaggcaaattaccggcatgtcaattagtagatgagcacatggctggctccacatgagtgcttctatacatacagtagagtaaccagaaggttgcgattgctagtgtaaacaaagcatatcaggctaggctggcacatatcctcgtttctgcaaataaactgctggtttcatttggactttttttccaatgaaatttgtgccctccaaaacagaggatgacagttcatcattagagtttatttaggttctacaagacaaaatttggtaccgaccatttggaacagtaaaaaaaatatcttctgaaattactgtagaaacgtgatgttcttataccatcaatgtacggatacatcatcttggtctaacataatttgttttgctcgaatataataacgtgcaaaggtgtatgacaatccatgttccacgtagtattaaaaacggcaggtaatgtgggtacgtagtgacgcttttgagaaagtctcttgaaaagccattgtcatctacatcacaaaagtttgatagatattgttctttgccttgctttatgctcgtcttttgcatcctctgtattcacctccaaagcttcggattatgatggcattatgctttctctgggagaattggagaaaaggtgacaagctacaagtagatagatacctcatccccatgtaaacaaccgatgccgcaaacgtcaatgctcggaaaagagaaaaaaacaaagtagatttaaacttgtcatgtgttctccatcttgtcgtaaaaaaagttattgacagtgactaatctacctaatccgtagattaaatcaatctattagaatacttattactgtatctacttatgtgtctaactatatattagagtatattccctgtcctataaaaacaccaaatgtctaaatttaaatttaaagtgagagttggtttttatgggacgaagttgctgttaatctgcaattagagttctcatttttgtatgtatctatattgagcagggattgctgcaatattttcggttggtggaagggtgcttggacctgatccgcgagcgcgaatctcgaggcaacttcacgtacgattgggtggtccgtacgcgggtcgacggcttctggaccggcccgctcgccgccgccgacgcgttcccggccggcggcgcctacgtcgtccccaaggggtcccggttcgggggcctcaacgaccgcctcggcgccggcggccgccacgcgtcccgcgtcgcgctgtccaggctctcgctgatccctcgcctcgacgtcgcgggctaccaggagctcaactcggaggcggcgttccaggcgcagctgaaggtggccggcgtcaaggcgagggagcggcggctgccgttctgcgtgctgagcgaccggaggtactcgttcccgccggcgccgtacggcgtgcccgtggcgtcgctggggagccccggcccgctgagcggcgccaagtgccggccgtgccggccggcgtgccgcggcggcgagtgcgcgtcggcggcgcggctggtgcgcgggtggagctggacggagtggcggaacgggacgctggagatgtgcgacgcgagcgtgccgtgggagcaagggtgggaggcgctgtttgacgaggtcgccggcgaggaggcggcggcggtgcggcggagggtggcgaccatgggcgcggacgattgcgtggcggaggtggcggcgctcatgacgcgcgccgagcggtgggacgcgcccgcccccgccgagatctgccgcgccggccgcctccgcctcgccactcgctccgcttctgccaatgccactgtcactgccaagcccaaccaaaattgatttgaccatttttttccctcaggaacaccaaaccaaaggcagaaaaggaatagaaagaaagaagagaatacaagttggatagtggtaactgatacatatttttgtacaaatttcatagagatttagctagagatcactgatgaagaatactgaatacacacacagtgtatatagcgtcaaaattcattaattgcatgatcagttgttcgtttcttgtacttacaaatgatactaaaacataaacctaatctaatagtacgctcgatagctgcaggcagcatgtctcatgcattcttgcaagctgactactaatctaatctgatggttggtgtaaagctgtatccatctggaccacctctagccctttcttgcaagttcgtgccattgttggtcagtgtatgattggtgtttgtgtgtgtgtgtaaatctattatttggtgggcaaatcaccataagacgaggcatcacatcgatctacccatcattcttgcttgctgtttcttctagtgttagctctaggttgcccaattttatgaccacttgtttgttaccccatcagatggttatcatcgcaatatctcgatcgatcgatctctggttccttgtatctcaatctcctactaaactaactattccttgtttaaatggtgtgacatatacgttagctagggtaaatttcactcttgttacttcagtaatccgatcaagattcatgcttgtgctatggattcttttcagttagctgaccaaactttcctcacttgggaccgatgagattgagatggtgtgtcctttaagatagtgacagctcttatgtttggttaatgtgagttctgatggatggatttggctttgtatagaattatacctgtcgccgtcgaatgcagggttggtatacactaggcaggagaggcttcttttgctttcttgcaagacatgttaagttccctcttgtggcatagtttggacggcgacggatgttcagatgccaaaatactggcacatttgatcaggaatttctctcccaagtgcttctgtgcttgtcattttcctttgtccaaatcatatgctcacatttgttcatagctagaagttcttcttttttctaggatggaggggatatgttcgtgacctgtccaatgatgcatatatgaactccagtgatatcatccatccatttcattaacctttgatgtttccttcttgttaacatatttccactgatggatacattctggcattttcattcagagtgtatttctttgtttttctggtcaaaaaacaccaaacattccaagatggagttaatatctcatctgtaacgaccaacagggaggacacaaggacggataaaaggagctggcttcttatctgccaacagagacaagcaggtccccgcaacaccaacaccagcagcaacaagccatcaatgcagctttctcctcctcaagcaaccacctcgctgtcctacgtgtaatgtgttattgtccttggtccttcctcctccactggtcaggttaagccccaggcaaccaacgacagcagcaacaacgcaaaaacatggtgcaacacattatttcctgtcatttcagacaaaattgcactgacaaacttgcgacctaaaggagctgatccgttttccttttctctttgaaaattgtttgagcctttgcatcagaatcctattcctctccatgtgcaattaccgtatggcatctcctgtgtagatcgctccatgttggccatatgtttcttgccggatgttacaaccctatcttcagagacaatccatggatggaatttgcattgtgtaaaagcaaaggagctctcacctgttgcataaggcaaagctcgaatctatcaactcttgttgttgttccagcagcaatccgcgcatgatattcaattattgatttgtcctgtttgtggtagactggttggtgcgtttgttctgctcctcttcctgttaatctaacttggcttcttgtcagctcaagaggtgtgataacttggacctgactttcagagctggctatcattttgctggatgacacgcgagattgatctccttgtttaatcgcctaatcgggattgccatgttcctggatgttctacaagatcatccatcacagaggccatcacttgaccagagaggcacatcgcagctatatgttgatactgacatgaaggcaatgcatccgccagtttctctcagctttttttccatgatccttgcattcttctttagtcacgttacaactcttgccatgcacttcattttgatttatgatcaatcttggcttttgtctattacaaatagctgcagtggtcaagattcagttgacagaccatttcgtcttcagtattgccttctcagcagctgacgtgtttcctgtgagaaacaaaaattgctgtgttttagggacaatgcgtagaccttaccttcccaaacaacattgcaaaatctgaacttttgatgagacaggcagcagtatgaaccttcagctatgcatgactcacaggattgctgaatgctgacaccaaaacttcggcatgagaaactggatccaggtgacaaaatcctaaaatcttacacaagcaggatttttttttatttccacaaatcttttgctttactccagtagacaacagtcagtttactaaaagcttaatgtctcctacagatggaccatatggaccttcagaaattgagatttggatgatttattcagacatttacaggaaaactgatcccagagggaccaaagtggggggacaccaatagaaaaagaccaatatattcctctagtacaatatcccttcttttgcatgagattccactgctgcataaagactaatgagcattccaaagtattccctccgtctcaaaaaaggcaaaccctgactatgtatctgtctttttttttttgtgacggagggagtatgaagttgctcagtagtcggtaccaacaaaagggtataaacatctgatgcagaccattcaagtaatcaagctgtgctttcataaatattggatctgcaaaaagggaacaaatgaattgtgctagctaggtatttaaaatatagagatagcagaaaaccatacaactgcggacatcttttctgttgagcttgccggtcatggaaaaggcaggacatgatgactcagttttctcccatgctagcatgaaccattgcagtacctagtgaattacaagatttgagtaatttaccacattcttcaagatgtcctgaaactcactgtgtttcagtgaaaaacctattatgcttttaatgaaggctgagaaatgcctttaaaaaagggtgcatctctggttatctgacagctgcatggtttttctgtgtgtttttttaatcttgtatgcttgctagggggcactacataccaaaactaacccacaaggtggtgctccactgtcaataggaagatgttaatggatgtcagcagagtcatgccgcaaacaactaaccctagcggtggttgttggaggatttgaagaaacactagaaacatagtattgctagcaagtgcaaaccaatgggatgttaatacaataaaactgattaagttcatcatgagaatgaccaaatgcctttcagaagacaattgaactcactaatataacacagagaataactaaagtgctaccgtagtcaggagaaaacaatacaatgtggatatcaaatgtaaacttagcatagcaaaaattattggaacatttgctgaagctgtgagaaaactattgtcaatttgcattgattttatatagggatataccaataggtaagatgtccgaagcagctaaaatctcagtccaatagcatgctttttgtacatgataaaaacactgcactaatgatccatgtacttgattagctcatgcaattcactactagataatttattcagatacaatatttgattttagtgattctgattcatagtgttgatgtttttcatggtcacacctgaaaaaaaaatcgtttgaagaaaaaaaattgtgtttgtttacacaaaagcatcgaatcaagctagaaaagcttggtacagatcagaatagggctcttgccatttttgattctcaaggactaagagcatattcaagattttgtagcttcaattgtacattttggtagatcaaacaatcatatcacagattcatctgaatttgcatatttcattgtaatacaacaaattaaggcaggcaactagcttttcatggaaaaaaaaactaaggctgaagcaagtaccagggacaaagatactggccatgcagcctactttatgatttcatccggtgcagccacttgagcgagttctcgagctcagtatacaacgtcacctccgcaaagctcttgctctcgatcccgtagtcgaacacctcgtatgcatccggtattctccctgcacgacacaacgccctgacgaatgtcgcataagctggagcttcaagcttcatcgcggcaccaaccatggatttgtaaacatcgacggccttgtcgagcttcttgttcttgcagagccccatgagcagagtgttgtatgttcgctcattcggctcgcatcccttggcctccatctcctcgaggagagcaagcgctcccatggcgtcgcccttgacgcacatcccgttcatcagcgaggtgtatgtgatgacgtccgggaagtggccagcggcggccatggcgtcgagataggttcttgccttggtgaccatcccggcgcgcgcgaggccgaagacgagggtgttgtaggtgacgaggtcgggctcgacgccgtcgtccttcatgcggcggaggacgccgaggacacccgcggggtcggaggcggcgcagtgcgccttcatgagggcgttgtagacgggggcgtcggccttgacgccgtggtcggcgaggacggggaggagctgcgcgatctcccggggctccccgcggcggcagacggcgtcggacagcgcgagcagcgcggggcgtggcggcggggaggcgggcgaggggtggagctccgcgaggaggcccctcgccgcggcgacggagcggtggcgggcgaggcggcggaggagcagcgagagggagtgcggcgggagcgggatggtgcgggccgcggaccgcgcgaggtcgaccgccgcgtcgacgtcggcgtcggccgccgcgcggatggctgcggcgaggtcggaggcagtcttgatcggcctcttctctaccggcggcggcgcggcggccgtggccggagccggggttttggaagccttggctggggttttccggtgcctgggattgctgggcctcggcggcgcagggggctgggaagccgaagcatgggtgggcttggcaaggacggcgagggggagcttggcggcgcgcatggcgtgcggcaccttccccatcgtccccggcggcggcggcggcggcgagagtttgggaatcgaatggtgacagaaggagacgggaaggaggaggcttttggcccatgagatatattattgggctttcgtttagtgggccgtatttgggccaatggagtttgttgggctttgcattattgggccgtggtccctgcccatgtatgtcatgtcagccttgtactggttgggccagattgaatatttttggggggaggaggggtgagagtggaaaattgcaaagcgtgtggcgcgttgaccggttgaccccacgcaggtgggacacgggacgggagaggcgcgtgggaagaggggaagacgacgagaggcgagcaacacgatgacataattttataaaccactccacttgcacaccaccaaaagtgaccaaacataggcaacctttgtttcaaagttagtttatattttatctggattacatttatttatccaatctattgcactttcaaatttaatactccacacacacacatgaaaaaataagtacaactgtagatattcatatccaatatttgactatccatctttataattttttttaaaaaaattagtcacacataaaatattatttatgttttatcatttaataacaataaaaatgttaatcataaaataattcaaataaaacgaacgatcaaatgttaaatataaacagtgtaaaactatgatagaggaagtatagtagtactcctaattttcaagtattaattcacttgaattttgaaatgtgccctcgcactatcctcattctcctatttgagatgacaaatgattcccaaaatgaagggactaaaccgtaaaatcgccgcggctttctctttccttttgttccctcctccttggggtctcgcagcatatcaaccaatcaccaccggcggccaccaccaccaccaccaccaccatcgcctcgccgccagccagatcctccccctcccccgcgccaatcacatcgcctcctccgattcccaaggattcttcccgctctctttccttccttccccattcatccgcttcttcttcttcttcttattcttctttcttgttccgatcggggattcggatttggggattccgaggcagcggccgcggcggaggcggagagagggagaggatggggtacgtggggcagcacggggtggcgacgctgcggaggtacaagtacagcggcgtcgaccactcgctcgtcgccaagtacatcctccagcccttctggtcacgattcgtcaacctcttcccgctctggttcccgtaagcgccgcgccccctcgaatttctttcctttccttttcttttcttccattccaccagtgttttgatccgtgccttgtcaagctcctggctttcgccaagatgattgcttcaaagagaaacactggcactagttaagatgattgttcacaatgttttcttctccaccgcacaagtcgcttttgtgttttttttttcttcttcttttttcctacagggacagtagcatttcgagttttttctttgattcgttcaactgggttagcagttatcgcatatgcttatggcgctcacagttacatagcatgggcatgaggaatcccaagcttttctttagcttgtggagtcattttttagtttagagagcatcttccagtgggctgcagacagtggacatcaaaatgtcagcttttgttctccttgctggacactgaaaagcatcctattccatactcctattcaatacagtagtattagttaatccttttctctaacatgctaaagttaggttcattacaaaaattagtgctatggcttcatttttacatctctggtcatttttgcttcctacaggagggtgtaatctgaaacaatggttactgtaatatcagtacataatcatttgctgtttatcatccaaactaactagttaagcacttatggagcatttacattatgaattcatgctagtgcaatacattatgttgatttctttgtccaaatgtatttgttaaaatactaactttattcttcttttcccatgttggaatcgaccgcaggccaaatatggtgagagtcccgcacatgctgatactatgaactagggttttctttttgttcaagagctgacaaagcattgtttccattcctgttttccagattacactgacaggcttcatgtttctattgacatcggcattccttggctttgtaagtatcttatggctgtaaattttcgatgctttctttattgtggcctatacagaggagttttattgctcgttgatgcagcagaaatatttcagccaactgataccttattactgttccaattttatctgcagttttattcccctcatctcgatacagcaccacctagatgggtgcaccttgcacatggaatgcttctcttcctttaccaggtttcaatctcattttttgtttgattgtgccgtataaaatttccagtcgctacaagctagaaccttagcttagaagtacaatgcatgcagacttttgatgctgtggatggtaaacaagcaagacgtaccaactcatcaagtcctttaggcgagctatttgaccacggtagtctttactgaaaatacaacttggtgaattaagttttatccctttagaaagtcctgtatctgatgctgacatgactatatcttgaacaggatgtgatgcgcttgcatgtgctgtaaggctattcaccaacttttctcccttgcatgtcccaatatacggaaaatcttgtgaactgattgtatttattttatatattagtttgaggccttggcttttggaagcacggcaatgtgtggaaaagctaccttctggtattggttcattgctgctgtcccattttactgcgcaacctgggaacagtgagttcatgttacttgagttcttccattcctagttagagcatcaaactacactaggaaccaattttttatgctcactcatctattgtgaaatggtctgtggaatgctttagtgctcttaaagaattcgaaagcaccggtaagaaaatcaagggtttatcagcattggcccaattcaatttagtttctgcaagaacatagatgatagaagcactactttttttcaagttcaagaactaataaactagatactctgctcattgttgtttctatatttgcattgatattaagagactttcactgcatagattttgagtagtacctttctattcacacttaattgtcatctctgcagctttttcacaaacacactaattcttcctatagtcaacggaccgactgaaggccttatgctaatctatttgtgccattttttcaccttcttcacaggtactattttattcccatttttatcaacttttaactaatcaaatctattctgagcctgtaaatctttgtggttttattctgacaatttactgtgcatgtatatcagccagtcacattcaagccatgtggttatagcaatactaatagctcatctttcctttcacaggagctgaatggtgggcacaagatttccggaagtcaatacccctactaaactgggtacctcttgttcctggtatggggactagcaagcttataatcgtttcgtaatatttattgttttggtaatcatatggtactcaattgttttagcatactatttcatctatatcagtgcaattttttcgttaatactgtgcaatagacgtagggttttggacagctacaaatgctggcattgcctatactataattaattgctggttgcttctttgcagaggtcccagtatatggaattgcactgtttctaatgatagcttttgctgtaattccgacgattggatctaagtaagttcttactgcacagcatgtactactttatgaattattttatattacctgtcagtttagtcatctatggactatggagcatatgaatccagcaagcttctcttggaatcaactgaaaaaatagttgtgttttatttatcaattcactctcgaggcaactattgaatttaaataaaaatatcataacgttctttatttgatagccgataaacattcaacctatgatcaatttgcattattctaaacctacagcattcacaatgtgtacaaagtggtcgaggcaagaaaaggaagcatgctgctggcactagcaatggtaagatctaaatatgtcattttgtgattttatcatgtattcatgtctctctttttttcaaatgatattctattttgttgtgccagctctttccttttggtttgctgttggccggagttcttgtctggtatacctgttcacctaattctagtttagttgtatatatctttcttgttctttctattaatttattaaatttgagctagacaacagaagctagcagttaaggtaaaaaatcctccagcatgtcactgaaggatttttcatttttattcaggtcctacctatctccttcagatataatgagaaaccagccacatcttctagttattggaactggttttgcatttggctttcttgtggtaaggccttgtgctataactcatacatttattgccttgcaaatacttgttttgtggatgtttctcttttaacttcctgtcattgtgaaatatatttctgtctgtcatcctgcctgctgctatgaaaatcgccttattggcctaatgcatggaatggtttataatattgctcatcttattatttctcaatagaccatgctggcatgatttgatattttgtgttaaagattctgttcagagtaggtgtgcaactctaagcaacagtttataatatgatcactttatagttttagcattgtatcgttccaggtctgtcatgctaaaaatagtttatgtaagccagtatattttggtctgacatgcttcttttgttgcaaaagacactcttatgagcattacctaatatctacttctattatgcacagggcagaatgattctggctcacttatgtgatgagcccaaaggtctgaagacagggatgtgcatggttgttgcctaatcacctttgttctttggttttgttttccaccaccttttataagtaatatatgatgatacgcatatattttgttatgattaaacattgtgcctccctttgcagtccctagcatatttcccatttgcaattgcaaatgcgctgactgcacggcttgatgatgggtttgtgcctaactacctttttattatcctctacatgataactctttttaccaaccttatttggccatcgattgttgttgcagaaacccccttgttgatgagcagctagttctcctaatgtactgcttatttaccggtactacattattccagaacttaattactaccgatggcgcttgaagtagtagtttttaccgatttcttttcaatagtttttacagtagtagcatatcttaccttgtacaagcccttttgttccacgtatgtttgatctcactattttgatcaattttggcagtggctctctacatgcattttgctacatctgttatccatgaaatcaccaatgctctcgggattcattgcttcaggtttgtgttagtcactgctatgcacttcatttctgccattttgtatcaaatgtttgacacgaggttttttgtgtggtgacaggatcactaggaaaaaggcataattgtgaaccatccacaattgccttgctctggttggcaatcatatgttatatttgcgcaaaaaggcaaatattttcaattattcttcatgaagattctgctcttcagatcatatttgcatttgttattcccaggattgctattatccgagattgaaattatcatcagaacttgtgctgataaggaaacgacgtccttggaagagttggattttgtttgttgtatcacctagaacttcaattcagtgatgctcggcaaaactttttttttgggggtacatgttgagcagattggcagatgatacatttgtaatttttacattgtagcatcacctgagatgcaggtgtacaatttatgctaaaaatgatgctcattatgccttacatattattcatgctcttttttttgagagagagagtaaacttatatatacatactattatattctaatagattattgttcctctctccgggtgagctgatgtactgggctctgaaagcatgatttgaatttgctgaatggatgatgacacttggagagttggagtgaacttgtctattctcatttgaagatgcacctctgttccaaaatataagcactgctacatctttatcaaaacatagcttgtaaaatgcacaatcaattggatcttgctccaatttttcttatcccctagtgcttttgtcctgggcatcaagaatcaagaactttccagacaagctggcttcctcctttttgttctctcttgagccttgtggtagttactgagtacagttaattgtagtaacaagtaactgtaagggtgaatgtaatcacattccaacccaaatcctgtactaattaagcactgagctagctctctctcttctctgtatatataactagctgatctgcttgtattgtcacaaggtcacttgcttctcatagccatggctgtgctacgagctaccgagctccggttgcttctcgtggccatggccgtggctgctgtgacggcgaggggcgctgccggtggcggcgcggcgaaggttccggcgatcttcgtgttcggcgactcgacggtcgacgccgggaacaacaattacctggccggaatcagtgccagggccgacttccctcacaacggtgtcgacttccccggcggcgagccgacggggaggttcagcaatggcctcatcggcgtcgacttcataggtgagtagtagtctaagtagcttcatcactgaaaataattgaagtcattgcggtttgcaattgtatgcaaaggtggaaaaaaagtaagtgtaagtgatcatctcgtcgtcacttgagttaacaaatttcagcaaattcaatatgtaaattctgatgaatggagaagaatatttgaaaatgaaatttgtagcggctgcgatggggttcaccaggagtccaccaccttacctctctctcatcgccatggatgctaacagcagtggtgaggtgatgagcaacatgatgatggcagctgcatccgccatgaaaggagccagctttgcttccggaggctccggtgttcttgattccacagtacgcataaaattctccaaaaccattttgatcctgcatgttatttctgttattatgatggatatgtttgtggattgtgatgtcatgtaatgctagtaattttgttggacacaaaattgaatttcaagtcctatatatttatgatcaccagaaaaaaaggaagtttggtaggagcatggttgctacctaaagttgaaaattttcttccaaccttcaactaaagctataaattctgctccctggttcaaaatttggttacttacttttccaaagtgcaactactagtacagtttactgcacacaactgacaactgacttaacaaattatcattgcaccaggggactacaatcagcatgacaaagcagatagagtacttctcagatctcagagaccagatttcgaccatattgagcgccgaaaaagcgtcaacattgctgtcaaaatccatcttcctcatcagtgctggtgggaatgacgcctttgaattcttctcgcagaacaaatcgccagactctacagcaattcaggaattctgtgaagcttttatctccacatatgatagtcatgtgaaagtaagagatccgaactatgatccagttccttcaagcttcaagatgctaataggccagtagcaattgatgcaacttaataaaagcttccttctatgtaaaagaaagaaattgatgcaactcatgttacattttactttagtctgaatcaatatatctgaaattttgaacagaacatactccctcatttcaattgtccaccaaatgcaactcaaactcgaaatgcttggcatgctggcaaacaaattatgttttattaagttagtaactgttgaagtattcttgtagacattatacaatttaggagcaaggaagtttgcagtgatcaatgtgccattactcgggtgctgcccatatttgagaagtcagaacccgaccggagagtgcttcgaaccgctaaaccagttggccaagagactgaacggcgaaatccgggacctgttccgtgacctcagctccgaaatgcagggaatgaagtactccattgccagctcctatgaacttatctccagcctaattgaaaatccacaagctgctggtaagttacctcagtttaagcaaagagtaatatgacctggaactcacacctcaaacattgtcacagttctacttagcatgaattgaattgtaaccgtctacttttcagctatatctgagatctcacagacttgctgattgatttcagggtttgtagaggtgaagagtgcatgctgtggtggtggtggcaagttcaacgccgaggaagcctgtacccccagctccagctgctgcgctgaccgtagcagatatctcttctgggatctcctccaccctacccaggccacctccaagattgtaggccttgccttctatgacggggcagcacggtttgtcagtcccataaccttcaagcagctggccgacgcatagcatttcggcatcagaactagaacttaggattcactagaccaagacaatgcttgtatcaatctacagcatggcaaagatgctgaactatccaaagaccaaactatctgaaaaacctacataagagaggtgcttctcttatgctttaccctttgagaactgcagaaatggtgacagaacctgtcctagttttctcatgagtgtaagtaaaaatggttgctggttgtccccattaggtgattgatctgtgctctcctcatccaccggagagctccagtcagtggccagccattgcttcaccctgtcgcgcttggcgacaagccggcctttgttcctcatggacagcctcagggggctccccatcctgctcagaacctcctgagccagctccctcaccttgggctcacctctgacatcgctgtgcttgccaatgccacacaccactgacacctccaatggcaatgcgcggcgcgccttcatcgcatccacccactgcaaaatcaaaacataggctgcaattgtgctgaatccatggaggttcagcttcacctccgactccgaccaatccatcgccttgtcgagcaccgaagaggatgtcaggagctcctgcaccagctcagcttctgctggccattgagatgcagacctgagcttcttgaccaactcagccgttgacaatggcagtgattcccccaattcttgagccatcgaagctactgttgggcatgagttgagcacaaagttgaaggccttcgtcgtcggcgcaatccgcagcttcctcatcctcctcagccatgccagcatcctggaatggtcacggcaggaggtgtagcacgagagcacgatgttcgccgcgccggtgccgaggcggatgccggcgtcggacatggacgagatcaccctctccatctcggccatggatcccgccttgccgtagcacttcgccaccaatccgaactggaacgcctccggctggtgcccccgagacgccatctccctcagcgccgcctccgcctcgccggcgaggcccatcaggcacagagattttatcatcgccgtgtaggtcttcttcccggacagcggcggcgaggctcgcagctgggagtagaaatccatcgcccggtctcgcatcccgcgggaggagaaggccgccatgaggtcgcagtagaagagggacacctcctcggaggaggaggaggtggagtggaggcgcgagatggagtcggagatgagggatcttgattcctccgcgctgccattgctctcgagcagcgcggcgacggcggcggcgtggatggagctccacttgaaccaccgcgcctgggtgaccacctcgtagaactgcagcgagaaatcaaatcccaccccaaattcgtgacgcgaaatcggcaagaaatcacaagaataatttgggacgcgctcacgcacgccgcacgcgcaccgggatggcgaaggggtcggagtccatgagcaggcgggagagcgcggcgagggcggcgcgctccgacttggaggcgacgtagctgcggatgacgcgctccgccgcgccgggcgtcaccgtgcgctccagctccgacatgagccgccgctcgctccgccagctcgagccacctcccgccgccgcccgccgcagggacgccaccgccacgttcaccctcctccggcccctccccccggccgccggcgatggcgccggggtcgagagcgacgccgccaccgccaccgccatggctggctgctgcgctgctcgcgagcgacgcggttggcgcgtcacaagatgagacgtcttatcaccaacgggtacacatcgcaaggccggcccagtaaaacaattcagcccaaataggcccaccacatttggattagcgacccaactggacccaccagtcaagcaagcttcatgcatggctgatggggcccagttcgttagcaactgatgcagttcttgtcacgtttgactttattctgaaccaaaagtttatctgaaaaatgtgagctcattatgtataccctcattttgaaattgtgaacaaatcatacaccctataccctcattttgaaattgtgaacaaatcatacatcctcattttaatccacgagatgcaaaagatgcagtcgtgcaactcaaaactgatcactatgatgatggaatgccaaaaatttccaaacatgtttttagcaagggaacaattatttgcatgtattactgtgctcgaatttaatgattaatcgtgaagttttcagtttttcggcagaagatcaccaacttttgtgtaacacgctccactttcaacaagatgtcaaaactaactggtagaatataatgcagatatttttttaaaaaatataatgtatagaaatctggcctctacgtccacaagccacatccaaaggttatacgaatatttagattttaagtctcgtaacgaaacgcagataaccttggaaaatataggcatacactacaagattttcatctacaacataggaggagaaaatcggaattcagacatgaacaagaaaacaggatcaatttgtacaactcttttcagcacattcctttttctatacttgttctcattaatgcaacaaaactagaacaagaaaaacaacagcaaaagaaaccaaaaagctgaaaaaaaaactaaataagcaaaaaaaacaaagctgcaacaacgtaagaaatactttttttttaatcactgtacaccacaatgcgcttccctcttgttgtgggatgctacaattgaatgatgcaccaacattgtataagctactttcagtggtttctcttcaatgctgaaagaaatcctgcctttgatttctggcgaccctcggtatcagctctcacctgtttttttaaatcaggatattaaaacaaaatttaatatatatttttctggagcatgatattgaacatgaaacaaactaaaatttcattgagcaaatagtttctgtttttgtaaaagaacaaaatcttgagaatttttaagaaatgcatgataaattgatgagtcgaggtgcattagaactgacctctttggggagtctctgaagaatctccagtatctgggagaagtcaggcctttcagcaggatctctatgccagcatttctgaagcagctcagacagcttggggtgcgtatctttcggaattgttggtctaaggccctgcagaaaatgatcaaaatacacatgagtgaaccttaattttgtgtagaattgttgtaaataactagcagctctctgctacatatgtacaagttaaaatgctgtcttgcaactcttttagataccaaaggcaatctcctatcttaggccttttatccaaaaaaaaggccatactttatgaaatcaagcaggtataccgtatatatgcatgtatatgaggatatagataaatatgccaataaatttccatgaaatttctaggtatgtacagtgtctctaaaggacctatattctcttgaaaatacttgtcttttcaaactactcctacttggcaatcacggcaactatttcatttacaatcaaggttcataatcattttcatatgcaattcatagcactttctgctaatggtaagaatctatgatgttaagcagatattatatgtgaccctacaattgagggagctacaatgacgtgacttgacggaagtttgttctacttcatctcattcccatgagcatggtaacctgaaaacctaacttgcacctctaatcaggtgagtgattagtaggatggacacaaagggaggcaatcgcatattaaaagaatggtttcttgaaagaacaaggatgccatcattttttaaagactgcttctcgaaactactgtatccttagagcatcacacatgtcccccacttgaactaaagaaatccagcacccacaggacatagctatacaatgggtttcatcaacattttaaatttttgagctaaatactacggataccacgcatgtaactacagaatttaagcagggatgcttgcttaccttctgaacaacacctatggctgcttgtagtggtgttaggtactcatagggtatctgagaaattgaatagttaggtgagtttagttttatatgtaattaatataagttggaaaaagaaagaaagaaattgactttttcctggagcaatttgtagttaccttgccagttagcagctcccatagaacaataccaaagctaaaaacatctgctttatgatcatagggcttatgttcaatgacctgtagttacaatagaatacaaatgttagaataaacaaaaatgctgttgttattcttatggaatgagcgtatgtataacaggcacctcaggtgccatccaacgataagttccagtctctgcagtcatcactccggattgatctttgacacgtgcaacaccaaaatctgcaacctttacgacctgaaaaatatgatcgctctcatttagaagttcaatgacaggagcaaatatcactctgcacactctgtaaatcatatagcattatggatgagattatggatgagaaaaaactagccttgttttcatccataagaagattcgctgtcttgagatcacggtgaattatgttgttctgatgcagatagttcattcctttagagatatctgtcgccactctcagtatttcggatagcttgaaagaattgttctttttatgaaggtaatcatgcagactacctcctgacatgaaatctaagaaaatgaatgcaaattagagtgtgtcaaacactacagaagtttgtctacaaagattataagttaaaccgttgtaatatacctgttacaatatataagttgggctgtcttgtacaggcaccgataaactgtacaacatttctatggcggacctttctgcaagcatgtagattttgtaagaaacaatttggtacagtcaataaagtcaatatgcatatgatttgccaaatgctaaacaccagaaaatgctcgataaatgggagaagcaataaaaaaatattaagttaacctcataatgtagacttcctgtgcaaaatcacggtacatatctgcactaatgcgttcaggtctcactactttaatagctacatcctgactgcagtatgatccacggaacctgagaaagcaaagcatcaaatggcactcaatccccagttgtgtaaaattatattgttttcacttcccgacaaagataatggaacttacagatcgccatttgatccagaagcaaccttggttccaaacttgagaagcttgagatctatctcccaaacatccgtcccatctgttggtatttccacactggtagatggcatactctctccacctgacggaccttccaatgattgtgacgatgagtttgatgttggccaagcttgtgtctgtacacgaaaccaaaataaaactaaaacaaatgttttttatctgaggaattcaatagaccttacaagatttttatgagtgcaatgaacaaggcaagtactggttaggaaaataatgttctgcattcctttttcaggtccaggtaccatattttcaggcaacaattaataccacgagaatgagttttttttttcgttgaacttcatagaagaaagtgaggggaagcttatacctcaatgtcatgaaacttctccagcaacttttcttttagctgctcagtaccctgcagtgtgcatcaaaagagcaaattatcaacacgaaaagtgaagtatgttactgaactaactgaactactgaagcgtttagctctaaagaccaattgcaataaggacaagacaaactaacacagtaacactattatgctgggtgcgtaccccaaggtgccaaccagtgacaacaaatacatccaatgagtaaccatcacttgttgaaaatgcatgcgcttcttggatgtcaagaccaagctcactaagcaagcaagtcagctgcaagtgtatgaaaggcaaagtgtaagaatcaaaacaattgctgacataagtcctgtataaaattgccttgaagttcacattaaacagatttgtaatgtttttttaatctttttttctaaataaatatgtccatttatttttactaatgattttcctaactagctacttgtcagcttttgaatttccttcgctttgttaagattgtattgaaagaagtatgcctacctgactaaggacctttggcttatcagttgttgcaaaagttatctcatgcattggcctgcaagattcagaatatagcgagaattaatcaactagaatgagaatatatagaatccaagtattaatcaactatttgcataatcctaatgaaaatgcccataaatacttcctccgtttcacaatgtaagtcattctagcatttcccacatcatgtctagattcattaacatcaatatgaatgtgggaaatactagaatgacttacattgtgaaacggagggaataaaggcttaagttggaaaaatgaactactcccaccaattatgagtacttttgacaatttcataatccactcactacatgatcaaaccagcgcataacaaagaagctcatgcgtggcatcggctttttgtgaaatgtcttgtacatctaaacaagtatgcaaatgcaatattgccagagaaagtaccatattcggaaaggaaattctgcatatcatggttttgcagctaactgttagtaacaactaatccactgatgctatcatttgttaaaaaataggccacagaggcatgcattcttcacaaggtaaaatatgcgattttctggttgtaacacaatataccatgttaattaattgatatagagaagtatcaaaaacagtttttaaaagggaatcgcaacatgccgacatgccaaccttgtaaggtagtagtacaagactacaagctagtgctaagcacgctatgattgtacagaatggcacatgaaccaaaagaaccaaagacaaatacagtgggctcctctgaaacacgggattgagaaaacaaaggaataggaaaaacacagaatttcgataggaattcaaacgcaaaatagaggattgtaaaacacaggaaaaattcaaaaattgaatgagagagatagactcatagaaaactttccatgaggttggacctcatgttaaaaatcctccaaaacttgtatggaatagagcattccttaagaatttcataggattcaacagttttcaatcatttgtttcaaagggccagataggaaaaaaaacctataggatttgaatcttacaaaaatcctatgtttttcattcaaatcaaaggggccctaaactcaaaataaagcgaggtacacgtgaactgaaaaggggaattatctacctggaaatgagatgaacactgctatcttcatcattgttactgctccttagattagcctcactcgcctcgagcgcaagtgcctctaagttggagcaagaaccaaaggcaggagggggatgaaccctgaaacgatttgtgtagtcaccattactccattagcgtgcataaaagacaagaacagccaaggagacacatgcatgaaagtaaacgaacttcatgtgcatatagatagatagatagatagatcatgcatacatttgtcttgccaagtggttggtatgaaccggctccatcccaagctcagaacaatcatccatatcaccatcaagaatcctagaaacctagatcaagcagaaaacaaagtttggtaagccaaggaattaaaatgtctcttcagtttgatgcaacatctaagctctactcttcagtttgatctaatgaacaacatgagacagcacaaatcaaattccccgagcaacaccacaggagagaaataaaaatctaatggaaattaagcagtacgcgaaatcgaccgacatgcaggcagccatggatggatctctctcacctggacgacgcgcaccgacaaggcgggccgccggtccggatcgcgcgcctcctccagcaaccggtggtgcgtcaccacgtcctccgccctatccgcgtgcacatccagcgcgtacctgcacgcccgccatggccatgagggaagtcggggagggggagggagggggagagagagggcaggagaagagatctcaccgggcggggaggcggtggaagtgggcccagagcgcgtcctcgtaggccggcgagatctcgacgggggcggcggcgccgaggccccggaggcgggcgagtacctcgctgtacacctcgaggcggcgcccgctcttgtccgcgcgccgtccccccgcgccgacctccgccgctggctgcggggacgacggcggcggcggcggggacgacggcggcggcggcggcgactcctccacggccatcgattactctcgaagcaaagcgagcgcgcgcggcggcgtggtgcacgagacgagagaggagagccgtgccgctactgctgctgggtctgcatggggtggtggtggcgcgcacgtgagacgtgacaatggcggcgagaaagtccacaactttatagacacaaacaagcggaggcgctcgccgtagagaagaagaaaaagatgagaagagagacaggtttttgtctaggttctggattgacttcttctcccctattggctggagtaataatagtaccattgtaccctcaacgtctcaaaataaatcatctcttactaatacacaacaaatctagatatatatccatattcattgtattcacattttaatacgaggttgatttatttttgaaacgaagggagtaatacaatgatccaaacaaaataattcaagattaatggtctgtttcgtactagcttcaattccacttattctaaagttcaagtccagctaaataatttcggctccatccagaatagaagtggagctagttaaactccaaatccagctcttggaattaaattttgaaaaacagattctaagtataatactaagaagttaaaaaaatcacaatttttattaggtattaaactccttccgtgtttagcttatttggaagtgaagtttaaaatagtattaggcttgaaatttaagtaaatttatgtttttattaaaaacattgaaaaaaacaagttgtattttaattggggattgaatattattggggataaggctgcagaaaatgggggtgatgaatctggaggatttggatgaccataataaaatatgaggacattaatccaaaaccgagtcaaaaatgtgatgtggagaatggagaacggttacacacaagccatgcaatgaccagtgaatcagtccaaaaaccattgctttctcctcgacctgtgtgcatgcgcagtactacaactccaaggtcaaagcagacattgcacgtggtttatttgctacgtccacacgtacggtgtgtatgaacccggaataaaaacattgctttcacaaaataaaaagaaaagttactaccatatggttgaactaagcaacaattgaagcatcattttaaaaggatgcaactctgagcgagactcaaaatcaacttcaaactgtgtaacgagaccatgggcgggaattgtatatatgtgtaccgctggcttctcaccaaaaagctctagtattaaatttataggtggtacctttaatatttctatattgatatgtttatatgtgtctatatataaatagagcgtacaaaatatgacaaaattggagcttactcggcgaaacttgcgggcattgatgaggcaatgtactaacctaactaagctagttaggttcattatatctcatatttgggctgggttcaatggttcatccagcctagacactcaaaaagtgggcaagataaacaaagatacaatattgcaatttgaagcactagtagtaccagtgagcaccatatcatagcaggatagtataattaaatcaagaagatattgtaaattatttggttagtattttctataccatgatggtcctatatgatactgctaactagtactgtatgactatactgttaattggagctctttgagcatgtaacaatggtagcaagtagaaagtagctagctagtcactgaaacgtacttgtacgtacgtaattcaagaatgatagataagctaatcaagtactgatgagataacattgtccttatttatttgtttgaggcgattttctactaaccaattttttgataaatacagacacagcgtttgtggtaagttctgaaaaacttcgcatatatacacaccggagggaacaaaagtaaaaggaaacttcgataaatcgtttttctttaatttggatagtatgagtgatttgaatttgaaggcatcaattttctgacggtatagcgtgggatctttttcagggtacgtattttgaattgaatggaatttagcttggaaattacccactctaaaaaaaacttggaattaaaagagtggtgccttgcttttgcctatgacctcgttctcttaaactatatatatgcagttcacctttcgaggcggagctggatatgcccatgtcgatcctccgcatcgcacagttactccatgcacgaaccaatttttggtttggctaatcacgccacgtgtactccaccatttctcaaaaagaccgtgttttagcatgtgtaaaggaatatgcgattgagttttaattatcttcttcgcccattgatataattagtaaaaaatactactccctttggtattatttgtttgacgttgatcatcgtatatacacaacttcaatcagtaattttcactactccattcgcccctttaagataatcgattttaattatttactgctccttactctaccaactctcatctcgtaccaactctcgtctcatactggtcgctagcttctatccaatctctaactaaaaggtcgtcgggcatatccatagtattgtaccccagaacgtgaaacgtaagcaagtggacatttatcaccttatctccgaaaaaaagatagattacatcgctggctcgagcttgagtcttcgcatcggtccaatggtgaggattcacttgatatataaaatccatcataaaaccatgttggcatatttctagcgaaaccttattcaatttgacacatggctcgagacaagcagcctgatgtttttagaatatgcttggggattaaacccaacaatcatacgatgattgatctccacgtctaatataagcatatatagttgtggttaacttaattaatcagagaggaggaatgatatttatatcaagtgctgaacgagatcaggactccagcccggcacctagcaagtactcctacgtagtacgacacatggatcgatatccatttatactagtggatcagtagtttacaattgactcgcaaaagcaagctaagcatcgagttaacatcggctagctattccagtgacagtgatttggtcctaaccaagtggctgctgaattattgaccgtttgcaacttaaattaattgttgtttttatcactactacttgatctccgactctccgtttgagaacatatacgtgttaagcagttcaaaattaaaactgaaaaagtcatgaacagcggcagaccagagatatatatagatcgagaaaatatatatagtaaatgcacgatgtgtaacctgcatttttgtcatttagttaagcaataattaagcattcattatccaattaaaaagcaataagcattgtatattcagagttgcaggcgaagtcacgcaacaaccgatgatcgatatcgattcctggcgtcgcatgcgtgagtacttgtgcctgtcggcatcagacaaattaagcaatcgattcattaattaaacatatgtgtgtggagtagctataaccttgcagagaatcagatcgaataagttaaggtaaacgataaagataacataagaaaatatatcaatagtagtaattaagtctgcattttgtttttgctgggaaagtctgcaataattagtagtaaaaaaatagtgttggatccaatcgttttgcagaatcaagtgcaggtttgacctgaaaatgcattgcagcatcagagtgagagatgcgtcaaattaaacgagcagtggcgactactggacgggctcgactggccgcgtcacaactacaggatatgcatgcagctggacacgtagcttcatcgaccgacacgtaggcatgcagagatacgcgatgtctgacgaaattacgtttataaaatttactactccctctattatatattataaatcgtttaacttttacatagtcaaacttggttaagtttaattaaatttataaaaaaatttagcaacatataaaatatcaattagtttcactatatctaatatttaatatattttaataatatgtttgttttgtattgaaaatactagttaaatttgaatagatttaactaggaaaaaaagaaaactacttgtaatatgaaacggatgaagtagttgatttggctgtgacttattgacataagatcgaagatgcattctttttattattattgaaacagagcagcagatagatgcttctcgggattttcagaacgtgtcatgaagataggaataccagaatttatacactactcctatcatgtgccttaggatagtacaggcgtactataatatattgagttattcaccatcaattcattcagttttaaacccctttaaaaatcatccatccaatcgtggcatttttaaataatgttttgtttttgaaatttctttgcatgcatataaaataaaaagggataataataacaatactaactatcatcatttgtgccactccaagaaagaaggaatgataggaaggagaaaaaaaaagaaaggaaaaggagagatgaggaagagaatgttcagcaatttggcccatatattaccgatgggccttccaaatacgtataacgtggcccatcaacctggttcgaattacgtatgcagcccagcaacatgcgtccggatacaacacacacaaacacatgctatgtttggcctaaaggtctaaaaaagttataacaaaataataaatataaaatgtattcatatcctaggtagagtttaaatatttttatttaatttgtagaaattaaatttaatgttgtatgtttgtggagtgatatacggataccttgttaaatgttaataaaatttttaaaaattttgatagctatttgggtaccttgaaagaaatgaggtaacatccactcgaggaaaaggaccatattctaataattatggataaatttaaacgcttatcatttttatatttgtttacctatggagtaaaatacttgtattctgattctacacaggcctgatcaacgatgtgcttattatgctttatgctacttgtaacttgctaatgaagcgcgattacactcgtgactcgtccctgatgccgcctgtcgcacgctcttctcaagccaagaatcgcattccttccttgcatacatagcatcatttcatttgcgttttcatgcatgcccccgtggggcccaccttagtagactgcgggcccaccggtcagcctcctcttgtgcattaattcagcaatcctcccgccatgcatgtgccctacgctttcacaccgttaatggttagcttagctagcccccgaagcggccgagctccggtcatcatgtcttggtccggcgagctgtcgccgccggcggcggcgtcggggactcgcctcctccacggcgacctcgacctcaccatccacgaggcgcgcggcctccccaacatggacttcctctccaccctcctccgccgcctctgcctctgcctccggccgccggcgagacggcccagccccggccagagccgcggctctgtcccggccgacgaagacggccgccgccagccgcacggccaccacctcctcccgacgtccgacccgtacgccgccgtcgtcgtcgccggcaacacgctcgcccgcacccacgtcgtccgcgactccgaggacccagagtggtccacccatgtcctgctccacctcgcccaccacgccaccggcgtcgccttccacgtcaaggacgccgaccccttcggctccgacctcatcggcgtcgccatcctccccgccgccgacgtcctcgccgcggccgccgcgcccatcgtcaggagggagctccccctgtaccgccccgacggccgcgggaggccgaagcccagctccgccatcgtcatcaccgcctcgttcgtccccgccggcgagcatcagagcatctacgacgcggaacacggcggcgtcccggcggcctacttcccggcgcggcgcgggtgcgaggtgaagctgtaccaggacgcgcacgtggccggcggcgagctggacggcgtgcggcggcgcggggtgttcgagccggggcggtgctgggaggacatgtgcctggcggtgctcggggcgcagcacctggtgtacgtggcggggtggtcggtgaacaccaaggtgcggctcgtgcgggaggcgatgtcgccggagatggcggcgaaggtggaggaggtgcggacgacggcaaccgacgacgacgacaatccggtggcggcggagggcatgtcgctgggcgcgctgctcaagtacaagtcgcaggagggcgtccgtgtctgcctcctcgtctgggacgacaagacctcgcacgacaccttcttcctcaagacagttgcgttgcgtaccaactcaattcaactctgttcttgaatttttgtcaaagaaaattgaatttggatttgatttctcagggcggcttgatgcaaacacatgacgaggagacgaagaagttcttcaaggactcgtcggtgatctgcttgctgtcgccgcgatacccaagcagcaagctcagcatggccaagcagaaggcaagatataattaattactcaatcatttccaaaatatattactccttttatttttcacatcgtcttatttaaaatatatataaatattatttatttttgttatgacttgttttactatattcttattaataacttactccctccgtcccaaaatataatctttttttttaccttgatatggtctccgagatgctattttgaccaacaatattaagatgctttaaataaaaatagttgcatattataatagtttgtttaatgataaatctagtaacatcaattttacatgtttgatttttttttattttttgttattaatggtcaaagttgaaaaaatatttgacttattactatgctaaaaatacttatattttagaatggggtatatacttttacatatttatgctaaacttttagataaaataataattaaacgatacgtgaaaagttaacggcgtttgaaacgaaagtagtatcacaagtaaatctcgattaaaaatggtgcaatgcaagcaaagcatgcaagacccaatgctgagaggggcgtgtcagccagcgtgcagattgtggggacgatgtacacgcagcaccagaagtgcctgctggtggacacgccggcgtcggggagcacgcggcggatcacggcgttcctcggcggcctcgacctcgccgcggggcgctacgacacgccgtcgcacaggctcttcgccgacctcggcaccgtcttctccggcgacgtctacaaccccgcgatcccgccggcggggaacaagggcggcgccggcgaggaggggccgcggcagccgtggcacgacatgcactgccgcgtcgacgggccggcggcgtacgacgtgctggagaacttcgagcagcggtggaggaaggcgacgaagctgttcagaagggccaaggcgcactggaaggacgacgccttgctcaagctcgagcgcatctcctggatcctcagcccctccgactccggcgccggcgacggcgacggcggcgacagccacctctacgccttgcccgatggtcaccccgattgctggaacgctcaggtacatgataaaccgatcgattgatacttgaaatcgatggagataattttaatttcttggtgataaaactggcaggtgttccggtcagtggactctggatcagtgaaaggattgcctcgttgctgggagacaaaaaagatggttaataatctcttcttctctcttcatcaatggctcatcgtcattaacttatcaatcaatcaatcaataatcgacgtactccctccgtattttaatgtataacgttgttaaatctattatcaacatttggccatttgtgttatttaaatttttttacagatataaagatatttatgtcatgtttaaataacgtttgatgataaatcaagtcgcaataaaatatatggtacttagataaattttttaaataagataaatgataaaaaatgtatcttaaaaaataaatagtgtcataaatttaaaaaataaatagtgtcataaattaaaatacggatggagtaataaaatggtactccatcaaatagctgaagcatcgatatgcgatgcaggaggcgaagcacctggtgtgcgacaagaacgtgacggtggagcagagcattcacacggcgtacgtccgggcgatccggtcggcgaagcgcttcatctacatcgagaaccagtacttcatcggatcatccttcgcatggccatcctacaagcaccaagaaggcaggcaccatctgaatttgctgaatttgtctcatcacttgtctgaatcggtaaaaatacatggagcttagtggttgcagtcacctgagtaacaccctgacaccctaaggtcatgagtttaaatcttcatacgagcgaattacaattaggttatttgaggactaaattcctaatttcatattgggttatttgaaggctaagttctcagtttgttagactaagctcttattttaaaaagattcatatgtccggttggatgtagaggctgtaccaaaaataccattctctaacaaaattgtctgaatatgctgcacactgatgcatgtatatgtgtgtgtgcaggtgctggaaatctggtgccgatggagatcgcgctgaaggtggcgagcaagatcgccgccggcgagaggttcgccgtgtacatcgtgatcccgatgtggccggagggggttccaacctcgggccccatccaggagatcctcttctggcagaggcagacgatgcaggcgatgtacgaggtgatcgcggcggcgatcagggcggcggggatggagggcgcggcgcacccgcgggactacctcaacttctactgcctcggcaagcgggaggcggcggcggcggcggcggcgggctcgccggagcaggagcacaacccggcggccagcagcgcgcggcggcaccggcggttcatgatctacgtgcactccaaggggatgatcgtggacgacgagtacgtcatcgtcggctccgccaacatcaaccagcgctctctcgccggctcgcgcgacaccgagatcgccgtcggcgcctaccagcccaatctccgcgccggcgccggcgccggcgacggccaggtgttcggcttcaggatgttgctgtgggaggagcacctgggcagcagcgagtggcgggagctgaggtcgccggagtcgccggagtgcgtgaagcgggtgaacgagatagcggcggagaactggaggaggtacgccgccgacgacgacgatgtcgccatgcaggggcacctcatgaggtacccggtggacgtcggcgacgacggcaagatcagcgagttgcgcgggcacgagttcttccccgacgtcggcgggaggatccttggctccaccaacaacaactactgggattatctcaccatgtaggcatgtagctgcctctgcattcccaaattactattcggattaatatatgggactttctaggtgtcttttgacagaaaaaacctccctaaatcttgcaaattatgaaccgttggatcaatcgtgcaacataagtaaaacctacttttcctccttccgcttctcagtccatccgtcgccgccgcccggcctcgcgggctggtcggaaggagtcaacgacagcggcaagcccccccccccctcccatggccggcctcctctccctccccccttctctttccaaggttgcacggcccattttccccccaccgccaatgccggctctccgcccgctgccaaccccgcagctccgacgccgctgccggcgcctcgtcgcccgcccgtgtccaccacccactgccggtcatccaccgtccacggccgtccctttaagatactggtacgaagtatttaaattgagtgtctagatttcaggcacgtgaaattttcgaaaaaaagagagttcattttttttgtatgccgtagttccagtggttattatcacttccctgttagtacttgtggcttattatcactccccagtttccaatataaaaaaactttataaaattacatgatataaacgtataactcaatacaatttacaatattacatgaaaaaagaactcaaacttacataaaaacatatatagcaataaaactgtagttaaaataaattaaaattgcacattgcatagccttatcaatgtgtaatatttggtgaatatataaattaaagcttacaaacttatagatgtcttaaaaaataaattttaaggtataaaattagctatattttggaatgaaagggagtactagcaattagcaaatcatttctatgcattgatttgagagtcatttgaccaatgttgttgctcacaattgacacgtgtgtaataactatctacacgcctgtcttataccgttatacgctgacgtcagcaatagtgtcaccaacccgcgcgcgccatggaaaccgccgcctcggcgtccacctcaacgccggagggggattccggccaacatgccgccgccgctccgccgcgcatgaccaccgtatccaagcactacttcggcggcgcctcatcggcccacaaccacgacctccgggtggacatcatcgaggtatgtcgcccccccccacacccccccccccccccccccagtgttatgggtgtctctccaagacgcctcgctgccgcgatcggtaaatctcgccgcgacgtgacgagcagtagcaccatggctgcgagtgaaggtggtagagatggcgacgccggggttaggggtgattcgtgcaggccaagtgctcggcgaaatgccgcacccggctgttgttgatcggctctcgacaagtcctgggaattttccttttcagaaaagaagtcggcttcggaaattgttgcttatgattctgcatttttgttttggattcaattgctactgccatctctgagtttctttgacacaactgctgttgcctcgtagaatatagaagaggattacgggatgtttgtctggccatgcagtgtcattctagcagagtacgtgtggcagcagaggtcacgcttcactgcctccacagttgtcgaggtactatacttgtcatctttaaattctactcttgagtgtcaatggccaatgatgatctacttgccattgtgatgatcaaccataaatcaggtcctagcgccagcctctgttatgaggtttggtacagccattatgacattctgttagtagtaattgtatccagttcagagcatattttgcactctaattttaatttgcatgtacgactttcagcttggtgccggaacctcactaccagggttagtagctgcaaaggttggagcagacgtcacactgacagacatcgcacataatacagaggttaagttcattcagaggggtgctgtgtttcattcatctaggctcatattaattattttcttcttatgttttatcaataggtcctgaacaacatcagacaagtatgcggtctcaataatgtcaactgcactgtaagtttttttatttagagggaaatgcatggtggtactttgcattctgctacatagcttaacaaatctgcattctacaacatagcttaataaatctgcattctactacatagcttaataaatctgcattatggtacatatagcttaataagtcgacaacactcatgcaggtattaggacttacctggggagaatgggatgaacctacatttgacttgcatcctgatgttattcttggagccgatgtgctttacgactcagcaagtaagctacacctacacgggctacacatctgtatttgtagttctgtataattttcatgttgactgacctgcacacaactgcatcaatttggctagagtttgatgatctcttcgcgacagtctcatttctcttggaaaattccccgggggcgatgttcataaccacatatcacaatcgcaggttccgggaattgttttacccttctcctcatggaagaattgcaggaattgttttacccttctccttgtgtgtcaactatttgattcctgtatgcagtggtcatcatttgattgaatttttaatggtgaagtggggtttgaagtgtttaaagcttcgggatggcttctccttccttccgtcatgcaaggctgcttcactacaagggaacattcagcttgttgagattgcacttgacaaggaaaaaccgaactgctcttcagctgacgagaacaatctgtagcagttatgttccatgcggttcagccttatgggggctgaaggcaagaacatggcacaactttggggcatcctccgcacacaggttaacttttataacactaggtgatttccaggagcaacatcatgtaaaattgcccgtacaaaatattctcaagtttaaccatggattgtatttgttggacaagcttgttaaacgaagattcaccaaaccaatagttatgacagaatattacacatctctacacgggatgttccaacagaacttaatcgaacatgttttccttagtatcaatgagatgataatcatcagacattgcatgtaggagcagcaatcagttgtaatacaaaatgctcctcattgtgaggttaacatgattccaactcacaaatttgatatgccacttgatatgataggaccgtcaagtattagtgtgtagctgatgaaacttctatcagactgtccagcaaagcacacacgagaacttcctcttcattagcaccagtacggataaatctggaatctggattgttttcaaattccgtaaacaggtaaataaatggcagtggaccatcgtgcaaggatctttcatcctgagggaatggtcgactcatgcctaggctgtgggatcattgtcgaaaattcctggatgtacataaaatacttaaaatgtgcatgcacgaattgaattatgcaagaaaacagtactaattgttaacactggaactgaaggaaacatgaaaaaaatgatggagcactagtccagaaacatgcaccgattaccttttggatgtcagcatgttcccctcaagttcttgtaatcatcgtagctaagaaatttatccttgatttttagccagtcagctggctttggcataaaaattgctatatatccttctctgtcagcctaataaaggtgggaaaagtatatgtgttggtcagagtatgaaaaaaaaataaaaacttgcgcaagcagatacagaatgacaggtcacgagtaaaaggtaatgcaatatatgacaaacacacagtgatccacagacttctatcacaggtacagagctaaatgatatctagtcaattcatttgtgagaagagggtcgacctaaacctcccacttcacccacaatctacgttcatgataaatgcaatagctgtattcatgatatatcagacagatgtgcaactttaccagtgtttatctggaatccaactagtttttttattctaatctagtctgtgatttcctatgtatgacttcatgtcacaattctattcacttgtgtatggcaccaacattgaaatttatgagtgaaataattcaaaaatctccttgctgagtatgggccttttttgcaacaagatggcagaataataaacactatctcatgtttgatattagaatgttactgatacagaaaactatagacaatatgtccatacatgtctgaccactgtttcaatgcatcagacaagtgacaacagtaaaaaatatatatttaacccaaactaaaaaaaaataaaaagaaaacaaggaaagaactgaaacacaggaggaaagaaaatcaaggcacttgttaggtcaaaacaggatactcacagaggtgttaagcaggtctggttgtttgatcaatctatcattgatctccaaaagtgatcctttcacacaacacctacatgagtttagcataaacaacaactcagtgcaaaaatagaatggcattatcaattattgattgggagatctagtggaccaacctcactacaaaagaattactacttgtgcagactttacacagcgctgaattttcttgcaaatgttgtgcattctgtaaagtaaaataagaaccgagtcatgcttccatagttccaataagtcaaccaatgataaaaacatgcttcaagagttcaagtcatccaattacccttttgcgttttcctgtgactttcatctcactgcggtctgacttcccaacattgaaatcaacggcagttatccccccttcctctttcaatgcaatatgggctgaagctaaaccaaccacacacaatctgatcttttgagaaacagaagaaaccagcgagaaaaaaaaagttcagcttcatcatagacgcggtaattaaaacgaaggatggagtggcacgtttcagctcaagctacatatgaaaataattaactaccacaaaattgaagcatgcctcaaaaagataaaccaatggtatgatgatattccttaagaatgcactagacatagttgcctattgcctacatataatctcattggggaaaacacaccacagtgaattatgacctgctttggatccaccttgtgaatatgaaaagttcatcaacaaacccattctaacatttttttttctaaggaagactaattttgatttcttgggagctcacccgtttggatggcggtacacatactgatcatgtcctggattgagaaagtctgcccaagaaaataacaagagttgaattagacgatttgaagcatagatgaacctatatttcaatcacactaccaaatgcagcagaattggattcagttcaacataaggttctttgaagactcggaaatgttcactgtgaccagaatatgtatgggcaatgtaagatgtggccttttgtttttaacttgtattggtcaaagaaaagtaaattcatagacaaaacgattcagtatctggtatttcaacagcaaattgggtaaagtaatccatggtccatactcgataaagcaatgcgtactgaaaaggctagagcattcagcccaagtgaagaaattggagctctacctacctaacgacctcaacaacttctcaaccttccctaaccttaataacggaatgccaagttcccctaacatcgaagctctctctatgctacgtacaaacatacccaaaaacccaaaaacccaaaaacttccaataaaaacttccaatcttttacatcaggtagggctctaggaagtaaaaagtaccagcgacgaagtagcgggcgaagttggcctccacggcggagggcgggaacggcggaaggtcgccggcatcggggacgacgagggcccgggtctcctcgtcgaccgcagactcccgttgcggggaccgttcaagcggcggcggcgcgtctagggttgcggattcttccgccattagggcgcgcgacgcgtggatctcctccgccgccggagagctcgtgccgcgcgtggccggtgtgggttttgctttgcggcggcggcggcgcgagcagaagagagatattcccgtttagatgtggaattaactttttgccactggacccacatgtcatagacacatgtggagccacgtgtcattgagatagaggtgacaaatagttatttgtcaaatctaaaagtggaaatagttaaaagccccgtgaagagaagggcaaagtgcgtgggagtgtgtgagccgttagatcattcgatccaacggcctacagcggtacagctcgggcgtttcggaatttgctcttttttttgcaaatccccacctcttttcctgctattccaatttgatcctcggcaataagggtacagttcatttttaaccctcgaacattgctcaaagtctgttttcaccattatttttaagaaaatgggataaactctctacgtccaattggatgtacatgtccataagaaccgattgttttttgtcctaaactttaaaaaacaaaaatagacacactgaaacttatttcaagttggttttcatctgtattagtttcatatttgtcaacctacatataagtgacagctacaccattaaaatatgcgtaataaaaggttcaagtcttcaactcaatacatatactcatatttatgcctatttatttttctttttagtggtagacggtgtgttcatcaatagagagacatctacgactataatgacttcgtcgatttctaaataagttagtccaatctctcagaaatgctcattagggtggggatgcatgtgtaccttcatataggcaaatatgcacacatacataagtatatatgtttcgaaaaaaaacagaaagaaaaaatatcctcatttcaaataataccctaatttgagagttgcttcaataatctttggggcagggtttataaaaccgcgcggttaccatgcacggtaaccttttcagtttttgaaaccacggtatgtctcgcggttaccatgtggttttcgcggtaaccacgcggttaccgcgggggtgcggtaaccacaccaaaaatggtaaggggaaccctgttttggggatgcccatagtaataggagacatgcgtggtttcataagggcatgctcaatggtagagacgaaaatggtctcttaaacaatgcaagattattaagagaccatgtctttacaatagttgagacgacaaagactctaatcattaactcaaaaaatattccttttgtcaatattcaatattctttctactttttttaccctcatgcaactttatttccatattacagtgattaagagtcattgttaagccattgtcataaataacagcgatgttttgtctcttctctttctctttcttccatgtcaataaatattcctaattagcaacgctgagagaccactgttgataaccattgtacatgccctaagagcgaatgtgtgcgtgttatataagcattttcgtctgtactatatttcgaacaaaaaaaattggcaagcaaaagtttttccaacaaaagtggaaaaacactcgatagaagtatccacaattctagctagccacatttcagtcatcaagtcattatgcatatatgccattaatcacaaatactagacaactacttatcaaatccattattactagtacgtagcattatgtttctttctcgaataattcgagtgtgtatacactagtagtgagacgtagatggtaaaatcaatcatcatcatcaatcaaacgcgaggtaatgcaggtgctgatggtatccgccgccgacttcgtcgtggtagtgctctccaccggccgccgccgccgccgccgcagcctgcccgccgtcgccgccgtcgaacttggcgtcgtcctcctcctgcggcgacggccacacgccggggtacgtctcccgcgtcacctccagcagcgagtccctcaccctgtccgcctgcaccgccacctcgctgtccctcacctgcaatgcagaaaccaaccagctcggagtagtcagctcgcgagctcgcgttcatggccatggcggcggcgagcggggcgtactaccatgacgcggaagacgttgaggacgagggtcttgtaggtggtgacgttgacgttgatgacctcgaggccgagcgcgttcatggcgtccatgaggcggacgaacccgccgggcttgtgctcccagagcacctggacgaacagctcgttcccctgcacctgacgcacctccagctgcggctccatccggtgcccaccgccgccgccgccgccgaccttgtcgtcggtcattgctgggtccttgttactcctcctgctgctgctgccggaaacggcgagcggcggctgctgttggtggctgttgggcggcgaggcgtcgtcgttgtcgagcccgacgaggctcgccggcggcgggtggtcgatgagcacgtcgggcggcttatggtggacatggttgtcttccagctcgtcctgcagctccttcacctgcttctgcaaccccacgatgtagtcgatcgcgtctccaagaatcgacgcgcgatccatctacgattcgttgcaaaatcaaacggaaatcgatttgaagaagcttttgatccgttcatggccatggcgatcgacgaggaggtaagataccttggtgatgtttgggacgagcgagcggagcttgtagaggtggccattgagcttcttcctccgcttcctctccgcctcgaggttcttgcactgctgcctcttggcgccgccggagcgcccctcgccgtcgccgtcgtcctccgggtcaccgccatgcagcttcctcccctccgacccggactccgccacgccgccgcccgccgcgtgctgcatctgctcctgcgccaccgccaccgacggctcgctcaccgccatccccgcgtacggccacgcgcccgccgccgccgcctcgtcgcccacggcgtcaccaccaccaccacccaagaacgggtcgtcgtcggcggcggcggcgtcgaacaggttcagcgacgagccgccgtacatcagcctctgcgcgtcggcgcctccgtcccactggaagctgggcgtctccggcggcggccacgcctgccccccaccgtcgtccccggcgccgccgccgccgcactgcgccatgacaagctccgccatctgctgctcctccgccatctgcaccaacaccgatcaacccacaaatctatataacccatccatgcaaaacgcaaaggccgttgcgtgcagctaaccgcaagctctccggcgttcgttggctcacgcggatggcgtgagccgccgccaccaccgccgccgccgcagccgcagccgcatcctctctaactactactcctctaaccaatcgaacgaccgaccactcacatatctcgacgcgaagagctcgacgaggccgccggcgacggggaccagcagccgcgtcttggcgccaccgccgccatcagcctcctcctcctcctgccacgcatccaagcaacacacctcatcagtgacagagattcatattcagattcagattcagattcagattcagctactgggttcagtgatgaatcttgcttacactgctgctctgccagatcggctggttcgacagcaatgcctgcgcatgcatccttgatggatagtgacagagattcagattcaccaagcatacaaatgttcagagttactagacaagaaaccatcaattttgcaggtaatcagaacacgtatcgattgattgattaatcattcaatttaccctatggaggaggagtccagtgggattgaagaaggcaggtccagcagtgctgagacctgtgcttcaagctcactgctgcagcagaatcctgtcatctccaagaacctgccattaattttgtgttaatggttgtatatcactacagagataataaatcacaccgtaattgctactttgcatgcatgatatgatatgatatgccaagtaatcaatcacatacctctgatcaggagagagcctccagtagatgcagtaatcccagccatctgaaccaactagaggcctcaatgcagcatccaaactggtgccacctccattgacagcagctgcagctgcagcagcattgctgttcttcatcagcaggtggtctcctcttcccatgtggtgatcacccttgccctagcagtgacacatgaaagcaagaagaatggatgcaagtgtcagttgcagcattcacaaggcctgctttttcttgctgtcaggacaggataagttgatgtcaccaaggatacagcgaaaattcagggtatgatcacagcaagggaacaatcagattcagtctgaatattcatcagactaaagagacagatttagtctgaaaattcagtctatgttgaatcaaattttcagtaacttaaagagacagagatcaaagctgcattcttctggctcatcaggattgtatgtgaaatcttttctagtgaatttttggaattaagcagagaaagaaagataccttctgtcttcctgagatcgcttcaaactaactgacgaactgtggcagtgatcaacagatggaagagagaggcatcagctgatagctattggtaactgaagaatcattttgtacagaaggactattgcatcatgcatatatatagttcacatgtgtgtgttcctctgaatttagccatggctatctgatgatgtattgataccaagtcttcggaaatggctgtcaaattatgtatgatactagttgaattttgaattctttacttaatcactccacctatattgctctgaaggtttgttgtgggtaggtgagttgcaagaaaggtgtgagagttttctaactccaatacaaatgttgttgtctaatacgcaagtaatcgcaattgcgatgagtcctctcaaactacgcaatgacagttttggttatactacctataatcatggagataaaatgttcacaagaacctcttttacatgagttctgagtgaaattcagaacttgtctgttaattcagtaaaaaaaaaaaaagttcaaatgaacagggtgagacagagccttgagctgatctggtccctctccattgacagcagacagcaaacgtaagaggttgttgaatcgaaaaaagcttagctgtgtgagatatttgctgatgcaatgttactctgtcgtccacgcttcagagttctgagttcaacaagtcacatgataaaaaggacaggcacaacagaaaggaaaagggatagctacaaaacccatatgctgaatttgaactgcagatttaaacatggaatatacaaacaattcgattatcaccattaaatgttcttattacgattctttggttgggtgatagctaaaatacatcatggcagcttgtggaatgctttccacttgccaggatcaggacatatggataattggataagtttgagaagtctcatctcttcagaaactgcatcccaatatagttatgtttgatgttcagaaatcagaatgctactctttaattaaattcgacaagaaactcattatgttcagaactagtcggcaagagaacacctgcagcaatcactgtcaattagactttcagaagacgagtaacggtcaagtattttgttctttctgcaatctgaacatctttggctgcaataaatcattgcagcatgtagtaaattaactgatggtagtacaaacaacacaaatctgaaatcactggtgacaaacgaactgtaggtgccattgatttcattttgcatcagcaagagcatgagagtttatgcccggtccttcgagaacatacacagcaaccaacaagtactactgtactagcaatatataatttggtcttgaatggcacatgattcttctagtgataagctcgaatatagtttttattgacagcaatgtggaaacactgtcgaaaaagttggccggtgttggatgcaaagatggattcttgtaaatgcaaaatctgacctcttttttcttgccattgaaatgtacatggagggatcaagttccatgaactagagccatcagaaaataaagtttggcactacttctcccacttggactttgcccttttggtcagaatccctactctcttttagcttcatgaggaattctcttgggagtcctaactttcaatttaggcacaataaacacagatatgcattgcaagtttgcaatcacttgtttaagctttaaggagaatatttggcaatgataagatatttattgttattttattgtattattattattattattattattattattattattattattattattattattattattattattattattattatcatgccctgttccttttttcttttcaatgtctcattcaagaatcatataccatttggaccatgctaatgatgtcggtatatatagcccagtgatcatcggtacccagaccatcgaaacaaaacattcttcagttgatcttgagattaagtcactcctccatcccatctcaagaactgatcaaggaaaggaaaaaaaatggcactgaggagaataatcaaggagctcaaggaccttcagagggatccgccgacttcctgcagcgccggtgatacgcaaatctttgcattacatcctgaaaatcttcagatagaaatgttcagaaacaaaatcaagaagatctattgcattaaattttctcattgttgttgatgaattggtgaaaattcaatcagggcctgtgtctgatgacatgttccactggcaagcaacaatcatggggcccaatgacagcccctactctggaggagtgttcctggtgaccatccacttccctcctgactaccctttcaagcctccaaaggtatgtgctaactaagcaaacatcacttgtctatcataattcaatcaagattcaagaagttgatgaaacccaatcatgaaatgaaaaatgaagcgtctgattgactcattgattgggatcttgggagcaggtggcattcaagaccaaggtgttccatccaaacataaacagcaatggcaacatctgccttgacatcctcaaggaccagtggagcccagctctcaccatctccaaggtaattaacaacacaagaacaacatcatcatcagcagcagcattgtgaattggtaatgaactgatgatgattaatagtggatggtaactcactcataattggtgcaggttcttctgtcgatctgctcgctgctgacggacccgaacccggacgatccgctggtgccggagatcgctcatatgtgcaagactgatcgcctcagatacgaatccaccgcaagaggctggacgcagaagtacgccatgggctaagcttagctgcaagctagctaattgcagctgaaatggcaattggatttggatttggatgcaggggacaatcagtcaatcaccagcatgtcgattagaattcagaaatatagatcgtgccataaaaaaagatagtaataattcttgcttgcaattattaggattgttgttgcaaatctgaatcatcgttatcatctaacctataatcaaaaaccatcgtcttcttggtgaggaggaataataaaagtctgcgattttgacggaattattgttcgtcagaagtgaaattggaattattgttctttaaaagtgaaaatttttcactgacacaaccgacgctttggccgagtggttaaggcgtgtgcctgctaagtacatggggtttccccgcgagagttcgaatctctcaggcgtcgattaacttttttattttttttccaaccaactcgtaatatttttttatatatattttcactttctttcagaatccctacggttacttcgagacgatttttttggggggggattttgcgttacccttgtgtgaatcgaacgctaccacagcccaattgcgaacagtccagctgctggattgaaaaataaataaatataatacaacagctctcgatattataatccatgtgtttgtaactttgtgcttaaattttgcagcgacatcgagagctaaatttaatcttagaaaaacaaaaggaaggcctcaatcgggtcttttgaaatcaggggacaattgccaattaaccagttgagatatatatatcttggttccaggcacttccagctgagttttatttaacctggtgatcttctgagatgataggttttgactgattgttggtgacaaccacccaccaaattgcatccagtttaacaattttcaaacatgtacgcatgtatgatattgattctgctaggctgttgcatagatggcctttaaaaatgtaactggcaaagatacagaattccagcagattccacatattataatttacaaacaggcctctacttcaaagttcaaacatgctctccacaatctccagaaaaatcattatgttactagagctagatgttgactccaggtaaccattggaagttgagtaggccacttgtatgcaacaattggacaagtcagaagaacatcacagatcttgctccatttgcagaacagaatatgaaggggaaacataattttccattgaagtgaaataagaaggaaaagaataaactgagtgcgattacatcatgtctacttatgaaacagggataacaagaattttttttctcaaacacaggaaataccatctaggaaagttacctaattgccacgacttgtcagtcacacgagataatcacaaggcagaaaggagaaaatgaaacaaacggatcgctcattgcctcgacaaagaggccttgctgcagctgccagtaaactaggatccccggaccatgaatgctgtttcgctgaagcaagacgcaacaataataaagcctggcaacttcatcgttcttcttcttcgtcgtctactgatgattagatcacaaaatggagcacgcccccctttgcgcctttttcttcttcttcgccttgggtggctgcagcaccacctttattgccgcatcgaaaacgcccttgacgttctgcagatcaggggggggcaggatatctctgttagtatcttatatgttattgcacatttagcaaagaaatgggaagaaagcagtactagttgggtctttgagctgcattcgatgtagtatggggcgcctatttgctttcttagttcctctccctacaaaagtggcaattaaggaacaaaaaaatgatcaagatatggcaatgtagtccacaggagttgcaagtacatctctgatgctacagtaaataaggaattaaacaacccacaatgccacaactgtacctgagcagtggtgataggaacagcaccaggatggtccacaaaaaactgcttgtcatctcgaagatctgccagtgcaataaacaatgtgaaaaatgtaagtgggctacagttggatctttacaggtcgaaggggatattatctgtagaatgattggaatttaatttcataagacaggtagaaacaccagccaaaaaaaaaaagacaacaaaactgaatccatcatgacaatagcaaactgagggacaacgtgcaatgccacaaatctgtgagacagagtataactgttgcatgttgttgaaccaaagttgaatagtacaaaagtagaaccaaaagagcaaacagttcaaataggtttatcacaagaatttcttgcaagtactaaaaactatggctgattgatatactggtactatatatccatatttttcctcttttatagagcaccctgcttcatgtattatcactaaatgacgtcaccagtaccaagcattgacatcaaaagaacacacaccaaataaaatcgtatcaacctaaaaatcccatgccactacttccatccaaaatcaaaaccgaacttgtgacaggtacaaaagattagatttctcaaaatagagccttgcacggttcttaccaagctttgttcccacaaggatgataggcacaccaggtgcataatgcttcagctcaggtatccactgaaatataacaaagtttagaatcaacaagaagtaccataagtggagactaaaaaagtgaatcgagccacaaaaatgatcaaatcaagtatcaacataagacaatgacctatgaacataaatttatgagattattatcatcatctatcatctctaatgggtggaataatccattgaaggatgcatctaggcctgctctaaattttgtggagcctaattcccagcatggtaatagttttatcatcgaagaaggcaaaaacacaagaaaaatgccagaagcaacatatcattgcacagacgatctcaaattaaacatgaccaacaaacttctttagcgaaagaagaaaaaaagagcacatcaatattattaacagaaaatgaaagtgagtcccttgccttctttgaaacattctcatagctggccttgctgattagcgagaaggccagaaggaaaacatcagctccacgataactcagtggtctcagtctgttgtaatcctcctgacctgtggtattccgaaggaaaaacttaataacttggtagaagaaaacaagcatgcagaattagatagcagcgcaaccagattacctgcagtgtcccatagcccgaggttgacggtgttaccatcaaccacgacgttggcactgaagttgtcaaacaccgtcggaacataatcctgtcaaaagcaatgacgcgaacaatgagtgcacatatcgtctcaaggcacaaccgattcataagatacaaaatgaggtgaatcctactgttacagaactgataagatatctatggtaaatgtgcagtccattctcaaactcttgcctaaagataagattacaaaactgatatatactccactagattactattttaccaggcctattatacatggcaagaagtccacaggtggtccaatggatacactacccccactacatggtcaccatgtctcagggctctaataagctaatctaccccccaaagcagctgaaatgttctcttcttttgaagatctctcctcaaaagagggaaattaatgtgcaattgggaaattaaccatgcgcgaaaagcaagggtggtggtgtgtaattgattgggtgtggatttgcgtgaaaggaacaaagaatgcgcttaccaaccatggggaaggtgtgagatgtgagtggaggagggtacaggacaactagaaagtcgggaaagcgatatcgagctctcgacctggcggatccgcggtttcccacctttgatagagaaacgccagccaaactgattcgacgttatatgaatcgtggggggaaaaaacctgcatttttttccgccgctaatgctgctacaatccataaatgctgcaagcaatcaaggacgaattttttgtttttctactgcattttttttgtttgagcgttcacgaggaacgaatgaggcagcatttggcttcgatttgagccacggtttttgatttggtacggggtgccgtgcaaaagatcccctttttactcaaactcgaatggcaaccctaggcaggaattcgaagccgcattgtcccaaattcacgagcggcggacgaatcagaaaagccccacaatttgggcccaaatccagatcaagaaccataatcctagctccaagcctccgagcacacaagtattttttttcaaaaataattaaaaaaagaagaagcaaaagaaagaagaagaagaagaaaaggaaatgtttggaggaagaagaagaagaagaagaagaagaatacgcacagtggggaaggtgttggaggtgtaggagatgagcatgcaggtcttgccgacggcgccgtccccgacggtgacgcactttatgaacctggacgcgctcatcctcgccgctccccgtcggtcgcagcagacgccgccgtcctcctcctcctgcgaccgctcccccctctctctctctctctctctctctctctctctctctctctctcaagaaactccaagaaagaagaaggttgaaggaggagcaaagcaaggggtcgacgcgagaggaaggggggaggttgggttaagattgggaggtggaggaggcgaggcggagagggtttctcgcagatcggcgggtgaagcggtctcctctccgcgccgaaatggtgggtggccaagcgcaagcgaagcaatagcaatgccccccaatgcaaatgcaatgccgagacccgagacaaggaaggagagagctcgctcgagacggaggaggagaagaggaggagtagagagagaggtggtgggtgaggtgggtggaggaggtggccacgttgtgcgcgcgcatcatttccttctttattaccgctcctccccgattatcacgcacgcatatgcccattaattatttctctttctcgccccccccccccccctatcattttgtagtatattagttgttctatagttagggcgaaaattcaatcttctttagtagtaattctaaactcatgtaatatgataatgaataaattatttgggttcaaaatatcgatcaattgttgtttacattgtagcaaccaaccaacgccgatcaaatgttagcgcggctgactgggtggctactataacacggtaagccataccgatcagggtcatcattaattcgagaaagaaattatatcctttcaattaattaaaaagtcatgcacgataatataagtatcttgaaataaatgattttggttcaaaatatcaaccattatggatgtaaattgttgccactacagctacaaaccaatatagattaatactgcaccagtggctaccgagcacatatgtagccaacaatattcattaggactgaatatagcttttatatttttctcgtttattcaaagctttgtttgggacattgtaaaattttacaggattttcatatgagtcaatttttttcattaatatcctttgtttcagtttcccatggagaccatattacttgctaatgtgacagtactactacggagtatataccaattgcaattggtagttgtgtagttaattccagctcacctgtgtacaaactgtcaaatggtaccagtgtactgtagcttttacagatgttatataccggtggttgatgacttgatgccattgtcctaacctggtgtactcgttacattgtcctaaccctgtctgtcaggccgagaaacatatatatgtgcacatatatgtagtactatcatactccctccgtaaaaaaaaaaaaaaaaaaaaagaccaaaccctggatttctgtatccaatgtttgaccgtccgttttatttgtttcaaatataaaaaatattaaaaagaaaagtcacgcataaagtattaattatgtttcatcgtctaacaacaatgaaaatactaattataaaaaaatttcatataaaacagacagtcacacattagacatgaaaacctagggtttgtcttttttttttttggacgaagggagtatgtcaaactcaagcttccaaaaccatgggaatgggtgatcataaataaataaatgtcaatttcatactattgtaatttttatcatgtgttacaatcatcatattataataaaaatagttgtattataaaaggacgatttgttatccctatcgggttgctatttggattttaaaactggtccatacaccgaccttttacgtcaagaaaagtttttaagaaggcattcacaaccgccctgaccttatttatgtcatttctttcttctttttgatgattggatttattatttttatcattttacgctttacctactttgttcttttatattttgtgcctaccatctgcccaaactgcaccatccattattgccttatttgtgtctttttcttctcggcgtttttgccaactcagtaatcaactgctcagcagtcattcattgtttttttggcacaaatttattcagtatatatacagaagaagatgctgtaagttcaactaacaaaagttgctgaaaaacctttagaggaaaagtgaaattgttagttggaagataatacttctacatcaagtgaagtgaagttgatgcatctcatatgttgggcaagaaatatgatttctatttcagctctctttggtcatattataagttctaagattgatacatcgaagaaaaatatcaaactgtcctgcattgaaatgcaagtattatatgatttgtgatagaattggacaaattgacatgacaaacttttcttataaaagaaatgttacacgaccaaattccatccagctatgagtagtcaccagttggcaagaaccaaaacaaaaccatgagtgcagtgtaccatacataaaatagtattgacagctaataaaatccaggatccaactggctggattagattggggcagttgtttgtttctttccctctactgtgcagtcacaatgaccagaaggcagaagcatccaccactcattgtacccaatcaaattatggaaacaaatatactgctaactgatcagatggatggatggttcatccaagcttactggcatcccaattttgcctcattaccaaatacaacgaaaaggttattgttgctggtatcaagccaggaaaaacataccatggtcaaaatttatttttatgactattgttgtggttacctggtccagcaaaaggcacacgaaaaggttgagcaaaacccttatctggtaggctacagcaaaggttaagtacacatccattttttttaatggatattcatccgttttttaccatagggttgcacagttatttgaatttgtgtatccttttagctgactcaagtgtgttcgacaaaagcatcgcaattgtcattggcccgacaccaccaggaactggcgtgattagtcctgcaatcttggaggcctcctcgtagcacacatctccaaccagccgataacctcgagggctttctggatcctgagacatttcaaatcactagtaagcatagcatgcaaggaaatcaggaagggggtgtagggaaagaagcagccaagtcaccaatttctttggaaccttctgaggtattaactgagttaggatacaaaaacatacaacaaaacttaaagatatgcacaagccaacatttaagtgaaggcttgtactaaattgattaatcatcacatattgcccaaacacatatacaatgtgaagaaatttaccagcaaagatatgggatcatcaaaatttaataaggcaatttaagtttttataaatgggtgtccaacagtgggatcacaggagggtctactggtgtagttccttacctgccttcgatcccagctgcgaggatctagacaataatgttccctttgttcttgaaaaaaaaaactatattccttctaagaatgtgacattttgcatatatgaaccaaacatgattagaaacatgaagtgcaaaagcattatatattattttattaacaacacaaatacaccattagccatctggatcccaccaatgtggtgatattccagggaaccagtaacattggaaatcttattagcaggttcaaactacctccgtcccaaaatataagggactttggctatgacatgcccagttttcatgcataaaacttatccatctagaaatgggttggcattaaaagcaaacagatctgttgaatgttagggaggaagaattaaggaagccaatcagaaaagtaggtgtcttacatcaactggattgatgccaacatcaataatagcagcaccaggctttatccaactccctctgaccagattagcaactccaacagctgcgataacaatatctgcttgtcttgttatttcctcaggcttcttggtatttgaatgtacaatgctaacagttgcgttggctttctagtaatcacatatggcataaaaacatgttaattaaacactccaataaaatttctccaactaattgaagtgagaattaattcatacttgcagtaataatgcagcaggcatccccacaatattgctccgcccaattacaacagctctcttccctttgatttcaactccatatctgtgtagtaattccatgcatcctttaggggtgcatggaacaaagaacggatcccgaccttgcattgcaagtcgtccaatgttcagtggatgaaatccatcaacatccttctcaatactaacagcattcaaaatgttctcatcattcatatgctgcaaaccatcagagagcagaaatacagatgctcagtggatggaagacatggaaaacttgtgtgatgctagcaggcaaatacctcttttaatgctaacaggtaaaatcattcaaagtatcttgatcaaaaaattattcaaaaatatccccatcattaatatgctacaaacaatgcaacaagattaacagagaactgcaagcaccagtatagaccatctaattaaaaacaaatgctgacaacaaactcgaaagaccacaaagggaatgcgacggactacctaaaacaaaggatctgtttgcacacatttttctaagaccagatatctttcacaagagcagcatcaaaccagttaacataaatagaaacatttagtgtacaaattggagatggcaccaatatcacaatatttccagaaaatattgtgcataaagtaatgtttccatggtgtgccatactgccatacatatctaggaatgtacctcactaaaaatacatttaactaccagttcagttggtaagggccaaaattcaatatcagtggataggttatacagagacattggcccaaagaaaattgttgaaaacttacatgaggtaggggcaactgaaccaagatgccatgcaccgacggatcactgttaaatgttgcgatgtgcttgagaacctcatcctcagagctgtcttccggcaaattaacctcatatgacttgataccaaccgcttcgcatgccttcttcttgttgcgcacatacgtttgagaatccttccttgacccaactaggatgactgccagcccaggcacaaccccaattgcatccttcatcttggcgatctcaacagcgatttcctctcttatctgctttgccaccaacttcccatcaatgatcttggcacaagcatctgatgaacacagttgtaacacatgcaaaacgattaaaaaaaagaattgtcatatcagtgcatcagaaaatacaaggatctcttcatatactccatttgcaactacacttgctcaacaacgaaatcaaaaacatagtactatctaataatacaggtgcaactaatagcaaatgggtttcacctgaagagctcttccagccacacacaactcgacacggatgaatagaacattcacagtcaggcaagcgaggagaagtgggcgcgcgcacctgagtcggtagaggaggcggcggcggcggcggcggctgaggccgaagccgtgccgcgcgcgcgggggagaagcgggagctggggggcggcgatggcgaggggcctccgcggcggcgcggcgacggtggccgggcggaagcggcacggcggcgcgaggagggcgcggcggagggggaggaggcgggaggtggcggaggaggagcagtcggagagtatggaggacgccatggctagggtttagtgccctggagcggcggcggcgggaggtttttcgcgggcgcacgggaagggaaaagaaggggggaaaaagaagagcggaaaaaaaatggcgtgtaaatgcagcagccgctaaaccccacgtaacaacaagggtttagggctaatccattaataataaaagattttttagggtctaatcaataattaaaaagggattatttattgatttactactccctcaaaataagtgcaacttttggggtaatatttattgtaactactatgtaactgcactgtaactacattatcatctccgtataatttagatataatgttacatatattattttattacttatataggagttacattatagttatagtaaaattatattgcaattatactataagttagatttgaaagttttctttttaaaaaactttcgacaattctctagatagtccctttagctaaattttaggcccatttggaatagtggaaggctggaagatatgtgcaacttttaggctgtgttcgcttccctcgttttctgcgcgcatgcttttcaaactgcttctctagttttctagctaaaacttaattaatcatgcgctaaacgctgcttcgttttgtgtaccagagagtgactcccgagcacagccaaagagggtgcgtgctccagttgtttcctcggtttcaaaatcaaaatgttgttttgaacaaattttggaggacaagtggatatctaacactccttgtaacgatgccattaaacgagtacatgatcttgcaaagatagtcacaaagatgtagagaattcaggctatgttctactgttctcagaaatatttggattcagcaactgaaaaagacaagcagcatcacctcgtaacctttgccatccaatccaattcaaatcgacaattacagaacagctaagcaaaattccgctttattaactacagaaaaccgaaactatagtttcctcacaactgtagaaatgggtagtaaaatggaacatatcctatgctttatagtggagtattacagaaaacaaaaactctccctgattgatctgaatcttgcagcctatcgagaagcaggaacggcagtttcagctggggactcttgctcctgtaccagtgactcccactccacctccttcaggattctgaacctctcgtcgagatttacgaaaccggattgctgagtgaccgctccacaggtgccggctttgtgtatgaggactacggtgccgcccatgtcaggcccatgaagcttgccagtcagcagtacacggagcggcataaagagtgactttccctggtcacaaatggatacagccagaagaggtaagttataattgttccattcaggatatatggcacaaaaggcatttgcaacaatgggcttgaatgtgattttaaggtgaatatgatggttagtatatacaagtcaaaacaaaggaagcttactagggttgggttgtcaaagtctagatcaaatgattcggttgtattttcatcatttctagatatcaaggtttaggtgagacagattgcttccataaaaagttgtgtttgagcggcacctaagaacaaaagaacaaaatgattgctgtcattactcattagcactgacctttcttttaagtgatttgccaaaaattttcacccacttctgccaaccatcacggccctcagctagtgcttgacaaagttcaccgctatcataagcagaaatgagtcctgatgcaacctcagaaagcttgtcttgcaccacagatttagcttcatcactggtaatttacatgtgaacagaaaaacgaactgtttactccaacagtactaccacaacaaccaattcactgaagaaactttccttttttggcgacaatttatgaagggactttcagtgaaagattaatgaagggttcccgagggattaaatttaaaacatcacatttctgcagacctgcttaatgtagcatggaggggatacgacaacaggtttgaaagggctgcgtcagcatcagtgatcaaatcgatgccatccttcaaaagctcagccgcttcctgtgcaaaaaataaagtaattatgttattagtgctccccaatcagttaccgtccatttagcatatatacctaattctttttagtgtgtagttccaaagtacaaacacccatggtgtgtagaaataacaaaaggcctccaatcttactttagcaaaaccactttcagactcctggagaatgcctgtgtccttccatctatcctcaaaactcttgatgagtacatcagggggaaatgatcttagatgttgtccattcatccatctacaaatataaaaagtaatgcattatgtaaataggattgtttgtttattttccatgatcaccagttcaagtgagtagttgtgtgcacatgcacttcttaaaggcaacggtggattagataggccaacaaaatatcagtaggtttgagcttgatggtggtttctgagggtaggtcccagtaaacaagctttatcatgatggaatgcgcctttcaaacactactgaccagcaggcagcaaagtacataaatacgtatttattactgattagacacactgcatttattgcttatcagacttatgtttctctttgatccataatgtggagtgattttgcgaactccatacagtatatcaaatccattgatacactgtacatttaactttgttggtcatatggagttatggactggacatgcttcccagcttgtgtctgagttcataaataaaagaacctatgaattactagctacttcctccatcccaaaaaaaacaaatccattgatacactgtacatttaactttgttggtcatatagagttatggacacattctagtacaacgaatctggacagatatatgtccggatttgtagtactagcatgtgtcatatccagtactagattggtttttaagattcaccttctaaaatataccaacaattagtataatatgaattaaaattttattagtgaatattatcattggattgacatttgaatttaatttcatatggttataattttgttgctacaaaccttatagtatatcagaaattataagcaaaagattatttttggagatcgtgacgtgtttgacgtgcgatagagggagtagtgacaatgacttttcactggttcccttataattgaaataatgcctgatatcagactaaagaaacataacaataagtggaagcaagctccagttcaactaattatagtactgcaactgagatatcacgagtaattagagaatactgacaaattctatgaagataactcaaccagaaggagattggcaaaaaaaaatgatcttactttaattttacagcatcaaagactgctccacttttgttgacacgatttatagtgaatttttccactggaaatgagatataacagcaaagaatgggtaaatggatggtgactgtaattttcaaaaactgtgcagggaaagtaactgaacgaattattcataaactaacctaggtcatcaatggtgaagaactcattttcagtaccatcaccccaaccaagaagtgccaaataatttaccattgcctgaggcaaatagcccatctctttgtactggccaaagaaaagaggacacattgttacatttttctaacattgaaagtgtttcagaaaagatgtgaaatggcgagtaattagctgcaatactatattttgccaaaatctagttggttacctgtcccacagaagtagccccatgacgtttagacagtttacttctatcaggagctagaataagtgatacatgagcaaacgaaggcattggaaatccaagtgcctgcagaagacagtcataggacagtaggcatattatgttgagacatacagttcgaagggtcaaggttgtaaacaatgatacacaagataagaatggcatagaaaattactttataaataagagcctgccgtaatgtgtttggcagatgttcttcagctctgggggagaaacaagaggattgcaaacttcaggaagaaatcatcaaaaggaaagataacaaaataattagtttacattacctgataacatgagagatgcgcatggtagcatcatcaactgtgacacagaagttatacactggctggccattgcttctcataatcacgaaatcaccaagcgtgtctaagttccaactgacctttataaaactatccgatgcttagtgtgtgtgtatcacttctcataatttgcaagcatgaattattgacagtggaaggctaaaaaaaatgcaacgatgtggcagtgctagagtttctagttattacctcaccacgaataaggtcattaattttcaacgacccttccttcggtacacggaaacggtaagtgtaaggtgtccccttctctaactcctgttgtatttctgcatctgaagcagtcccccacttgcccatgtatacaggtggaagttgcatctgctttgcagtttctttcatctgttcaagttcctgaagtaacagaaacagctatcaaatgggcaaatagttgatccagtagaattccagaagtaacctagacaaattgctgacggggtttaaactaactcatcccttagtattcatagttgaataaatcactacgagtgtttcatatgaacacacagaaagatcaagcttttttttttgaaaagcaccaaaataatactccaacattacaacaacctgtgtataagcgcaacacaatgcatcacacatacatgcagatcatgcaaggggagaaatatacctcactggagcaaaagcactgatagactgcaccagactccatcagcttctcggcatactgtttgtacatcgaattgcgctcggactggcgatacggcccaaattccccaccaacatcgggacctaagcaagtacaaatatgagcattcatatcatctaccatcatagaggaaaaagaataactatttcactggtttatccatgcttaataaaaccaaatacacatctccacagttgcacaatatcaataaagataagcaatcagattgtatcaatcagataatcataagaattgagcttgccagaactctcgagtagagtagaattcagcatccaaggcctaactacggtggacagcaatagagcactacatcaaaatgatactccctccgtttcaaaatgtttgacaccgttgactttttagcacatgtttgaccgttcgtcttattaaaaaaattatgaaatatgtaaaactatatgtgtacatgaaagtatatttaagagaaaagtgcataggcggtccttaaacttataaggttgtgtcatctaggtccccaaactctcaaaatgcacatctaggttccagaacttgtcaaagtgtatcatttaggtcccaaatcgacatagcccctatagaatcctatgtggcgctgatatggcatgccatatggacgtgatatgtccttttcttcctttttcccttcttttttcttcgttttcttctcattcttctttttttttcctttcttctactcgggaaaagaaaaaaaaggagaagaaagaaaaaaaagaggaggaggaaaagataagaaaagaagaaaaagataaatgggtttcatttgttagtcaaaatgatgccacgtcttgtccgtgtggcatgccacatcagtgccacgtaggatcctataggggctggggcgatttgggacctaaataacacactatgacaagttctcggacttggatatgtattttgagagtttagagacctagatgacatacccctgcaagtttaaggaccgcccgtgcactttactctatatttaacaatgaatcaaatgatatgaaaagaataaataattacttaaattttttgaataagacgaatgatgaaacacgtaaaaaaaagtcaacggtgtcaaacattttgaaacggagggagtacaacttaacttcctaggcagtaaaacattagagcgatatagagaaatcaggtgggtcaactcaccttcgtcccagtcaaggccgagccaggcgaggtcactgagcacggcctcctcggacttcttggtggacctctcgaggtcggtgtcctcgatgcggagcacgaacttgccccccttggaccgcgcgaagaggtagttgaagagcgcggtgcgggcgccgccgacgtggaggttgcccgtcggcgacggcgcgaagcggacccgcaccgggccgccggcgccgtccggtgacgccgaggcggaggcggaggcgcggacggagagggtccggcggaggtggggccgcaggaggcgcggcggcacctccgggagcagcctgatgcgcagccatggcgaccccattgccgccgccatcatctccggagattgggagtttgttgcgagaagaaaaggaagaagaagaagaagaagatgacgatgcggatagagtttggggatatttgggggcccaacaaagcccacgcgcttacaaactgcagtagcccaacaaccacgaaggaagagagactgacaggtgggacccacaaagcagtgtcttgtgaggcattttatccctcagagcgttttaatccagcaaaatgcggagttggaaagttgcttgcaaagtagagataagagaaattaatctctttgatcttgtgaaaagaaaagaaaagaatatactcaggtggcgtttggatacatcggatgtttggatattaatttaaagtattaaacataaactacttataacactaattatataaatggtgctaattcgcaggacaaattttttaattctaataatccataattagcacatgtttattatagcatcacatagactaatcatagattaattaggctcaatagattcgtctcgcggattagttcagggttatggaataggttttgtcaatagtctacatttaatacttctaattagtgtctaaatattttagtcccatctaaacagccccccaatccattaaaaaaagaataaaccttttatcgttcgtcttattaaaaaatattttatgattagcaggtttgttgttattagatgataaaacatgaatactattttatatatgactgtttaaaaaatcataaacatatgtcaaacgttaaacatagaaactgacgtatgcactttctttaaataggacggaggtagaaggaaaaaataggttaagagcatcaccaacagtctacctatatgatttccaaaactaattttaagagattttagtccaaaaatcagcttcaacagatcccctactctcctaccaagttttggagtttccttctcccggttcctcgctccgtttatatgcgggtgcgaaagtcgctcccaatcacacaatcctgcctctctccttcgttcccgtaaaaaaacagaattttctcttggtagtttaacagaagggtccacttttaagttttggggattaaatttaggctatccattggagggaggagttttttcactttctatttttaatttagaaaaaaaataaatttttagaagaaaattatagataatctgttggtgatgctataagaggatgaaatggtgaggacatggctccaccagcccaccggccaaaacaacgagggcaaggaaatgcataattgcacatgatggatggatggatggatggatgagacgatgcatgggcggccgacgacgaccctgcccagtcttttgttgtgttgtgtgcgttgtttgatccttcgtctgcaccctgccctgcccttgctctgctccgtctcgtctcgtctcgtctttggtattggcctttgtagcatcactgtagtaaattatggattaatatatctcgttagattaatctcgcaaaatagactaaaagttataaaataagttttgtcagtaatctatgtttaatactcttgaataataaaattttggagcactttaatcctagcgtgaagcatccaaacagggccattgttgctgctgccttttcttcccccagccaggtcaggcctgcacccccccccccccccctctttcgtacctaacgacaaacaactcctctatgctcctcccgcctccacgtgtaaaacccgctcaatctacactagtatattcataatactatcacattcgttaaaatcttttatatcatggggaagatgaagcactgaagtgagtagattttgacaaaagatagataaagatgaagatgaaatcagaacacgcaaggtagatgaaaaagtcatcggtatatttttttaaaggaaaagtcatcggtatatgattaattaagtttaattattatacaaactttatatatatatataatagacacatcgtttaacagattaaaaaacacgtgctaacagaaattgagataaaatttgaatcttaaccagaagagaatgaagaacggaccacaggcacaatagtatttagattctaagttatctaattttgagtcgatgatacgtgaatcatttttttttgagaaccttattgattctaaaatccacattgaaaacaagtcaagtctatagctagtgggtttaatttctacatagatgctacaactatgacaaagtttagcttaattagcactcaactagcacaggaatacatatacatatataggagtatccacggtcgtactagcccacagcaaatagtaaattctccccacagcaataggcaggggaatcatacataggagtataaaggtaaaccaccagttgagctgcgatcaggattacagtatatgagcgagaatataatctgttggctccttcggcgagaatcattcaattcacaaggataatgatgatgacattcagcatccatatcgatctcgctgttcaaaaaaagctccacaacgatacgattcgccacaaaaattatgcttacgcgcaacacaaaaagacaagctaccccctctataggtgcgccatccctccatcccgaatcattgccttctttcgtccacaacgcggaaaatattacagaatttacaacgcggagaatttaatcttgccgaatctaatctaactgtaaaattactaacagctctattttttcgcttatacttatcagctaaaatttaattttcgaaccttaaatttggagttgattttatggttttttcatcgaagtttatttttcagccttttcttttagatcgttaagaacacgtatataaaagttttatttgtaaattatttttcgtttgcaaatttgttcagcctaagttttagagctcatttggggcgtaggattcttttacgacgcggagaattttctacatcctccggaatctgaaactagtccctgtaaagtttctgtgttttatgacttgtttgacatacagtactctcaaaatgaagcaaaaaagggataagaatatatcatcagagtatgcaataatataggatttaaaaacaaatgaatgctgaggtaaatatgtttggatggttacgcaaaatagtactccctccgtcccattataagtgcagtgataagtttctgtgtccaacgtttgaccgtccgttttatttgaaaaatttatgaaagatttttaaagttaagtcgcgcataaaatactattcatattttatcatctaaaaataataaaaatactaatcataaaaatatttcaaataatacggatggtcaatgttggacactgaaactcacaactacgcttattatggtacggagggagtacatatgattcttgtaggaaaatatttgcaactttctagtaacatatatgcagaagacaatagagacggaaaggtaggccacattttatctgttttcctttttattttccagatttttgtcctaggttatttggtaaacgcttctagaaaaacttatcaaaaataatttctcatattgcattgttaatttctcctaggacaaagtttctttcataaaaacattgatttaacacgctaatcaagcaatctgcctcaacaatccacataaaaatctgttcaaaaaggaccttggtgtgcattggacttgtcaaaggacaataatagaatactaagaggtaatgagctcatgttaaaattccaacgaaatgaaggtatgtcagaataattttgccattatatttcttgttccaaacaatcctggcccaatttgatggatcttatatgaacatttaaaacacgagaatttaaaaaatgaaaaacacataagtagaatggcatgtcagtgcaatcctatggaatatcaaaatataagaattactccctttgtattgttttgataccacataagaaaatactcctattacagaaatttggagagagaggatgacttttggtgaagtttctcaatgctctaccttttgataaacatttattgtgagcagcaaaccgttttagatgtggttaccgtcatcctatagtcaaaatcacttatattttgagacagagggagtattacagaaatttggcgaaagaggatggctttttggtaaagtttctcaatgctctaccttttaataaaaagttattgtgagtagggtttaccaaactgttttagatagggttaccgtcatcctatgatttggcagtcaccataaaaatcacgcagttattgtgatatatactccactagagagagttaccgcaagtaataatcacgaaatccttacggtttggtaaaccttgattgtaagtcaacgtagtcaagcgaaaccctgggtgcaagatagagagatggacgtggcaatggcaggactgctcctgtgaggatggatgtggcaccagggacagtgagtgcagatgctgatgatcagaagagagagtgtccatgtggagggctggccggccttggagcaaaggaaaggatgagacgacggcaacaaaagcaggagagagggagtgtctctgacagagtgacagataggaaagggtcccatggctgctgctgccttcaggtatccgcacatgtctctctgacacgcaccaccaccccccacacagccaccccaaagattattttagaaaaaataaaaaattaaaaaaaaacttctctttctcctccagtactactcgtgctactactggtagaggagtaaaataaacgtacactcgtctactgctgcatctgctgcctgtcttcgcttttggatcccatcaactgaactgttgggcatatgaacacatgccttcttgcctgcctactgtccactccaccccctactgctgtcaaaacaaaaacaataatctggagtaattgctgattagcacatcaaactatgcagctttcaagtttcaactcccatgctttcttcttttgatcagaaaactgagtggatgttttggatggagtctaactttgtcataactcgatttgccataactgtggcaagccacacaaagtgtgaccaataatttgttggccacaactatgacaaactttagctagcaaatgagagtatgacgcgtgggccaatgtgctaataaaatatggattgactcaactgcggcacgcaaccaaacactagcctgaaaaattgtgacacgcctaaggtttggtgtggtaaaccgagaccaccaaccaaacagcccctgaggctttacccacaaggttattattgttgttaattcaggatttaaatattaacggataccttttgtctggctaccaggccaagtggactacctgcggaactactgaatcaaaaaaattaaaatcactccgagcttctgccacggcttaaataatgaataattttggatcataaatgtcaccttctgccacggcttaaataatgaaacattttggatcctaaatgtcaccatgttagaccatgtgtggcaaatcaacaattccagcagtaaacaattttggcccaaaccatcaaaatgacactagtagtacaatcaatctttttggttaactaaaacaggcatggataggagtaccagacaagtcctgcaataaatccagccgctgcccacccacaacattagaacaaccgcaatagtaaagtaagttgctctctataacacatctacatctcagcaatagactagattaataataaacctccttaatagtatgtctacatgggtatctatagctctctaatccattgcctcgtttttctcgttagtagatagctttgctatctctctttatttaatctcttttaagtagaaaaaaatgctgacatagatatcttgtagatagtatatagataatcattgcgggtgcccttagtactactactgtactagtagatggcaaaatggcactactgtaattttgctaccggttagtacatcttaacattggattgtattcatgatgatgcattaagggagatgatgcacgcagcagagtccgatttggtcaacaagaataattcttctttgcttaaatccatcaaccatggatcttcttttgtactagtagtaccattgatgaactacagtgattgttgcttaaggatggagctaaactggatacaccatgatccgagatcaccaccagatcaaggacaacaaagctactcctactagccaacaaaagaaatccaaaacaacaccagacacaacatgacacccaaggctcagggaactgacaatagtgtcaccccccagattcccagatgcagcaaagctactactcctgtactgtagtactactctcctccctaactactcagaaaacaaaaaaaaaagataatccattgtatgccaaagataatccattgtatgccactgagtttgtcataggtctacaatttaccactgactttgtcacgttctataatatgccatcgatttttgcttaacttctacgatttaccaccgccatccggttagtctccgttagtactgtacactttcatccaaatgaccaaaatacccctgagacaaaaactttcaaattttggataaaaattctgaaatgtcagactttaagtttttggacaaattttgaatgtttacaatcttatgtttataatatggtatttcggaatttttgtccacattttggaagttttatcccaggggtattttggtcatttggacaaaattgtacagtactaacggagactatctggacggcgatggtaaatcatagaagttaagtaaaagtcgatggtatattatagaacgtgacaaagacagtggcaaatcgtagagctatgacaaactcagtggcatataatggattgtctcaaaaaaaaaaaaagtcactgttgtacacaaacaggatgaatgcaacatcttattgatcctaatcaagtcaagcaaccaagatcaagctggatgcaacatcttattgattctaatcaagtcaagcaaccaagatcattagtagtactatcatgtatacaagtaccatcattattaggagtaattggcagcaaatctgtggtattgttagcagtatcatgcaagcatccaggacagagagaatattgatcatatgctgatgatggaatcgacaaggtggtaaaaattatagagtaaccgacaataatcatctttttcatctcggggaaaccacaaaaaggagagagattttgtcaatctcctcgcccaacacacaaaaccaatccagacatcacgtcttcttaacctgaaccagaggaccagaccaactcatagcagcaaaagcatcatcacacgagcagcagcagcagaagttaaaactaaaccgaaatcccaatagcaaaaaaagaaaaagaggtaaaaacaaaaggcaagcggttcctttatagcaggcaacgcgctctccatgtgacccagatcggcggcaaaactaaagcaataattcgacttaggagtgatgaagatttaggcgagatctaagaggaggggggggggagatggtgttgtgaatccatcacttgtggcagtcgcgggcgatgtgtccagcctcgccgcagttgtagcaggagcggtcgcctccaccgccgaatcgcccgcctccgcctccaccgccgccgttgtagcagtccctcgcgaggtggccggtctcgccgcagttgtagcaggcgccgccgccgccgccgccaccaccaccacctccaccaccaccgctgttgaagcagtccctagccatgtggcccatctcgccgcacttgaagcagccaccaccagcgccgccgccgccgccaccgcctccaccaacgccgacaccgccgccgttgaagcagtccctggccatgtggccagactccccacacttgaagcagcccccaccgggtccaccaccgccggatctcctccccccgccccagctaccgccatagctgcggccgccaccgccagatccgcccccaccgcgcgatccgaagcctcccccgccaccgccgccgccgccggcgccgcccttgacgaaggatccgtcggggccggtgacgtcgacggccttggtgcggccgtcctcgctctcggagatggcgaactcgacctgctcgccctcggcgagggagcggaagccgtcggccttgatggaggactggtggacgaagagatcctcgctgccgtcgtcgggggagatgaagccgaaccccttggtgtcgttgaaccacttcaccgtcccccgatgcctcgccgccgccgccatggatcgcccgccgaggagtcgaaaccctagccctcgcctctccctgatctgattagggtttgattgatttttttttcccctcgtctcgctacgcgtgtgcccgatcttatctgtttccttgggagactctatttataggcggcggcgtggtatacgaggaactcgagccgagaggggggggagacgactcgcgggatgggggttgatcggacggccgtgatcgcgcgaccgggatctggacggtcgtgggggagtgggccttggttcggacaccgacgcgtgggcccgtgactcgcacgtgtgggctgacggcccagctgtcagtggggatgggccccgcgcgagggtggcagtctgacgggtggggccatggagagggtggtggtgggattggatgcggtggctacgcgcgtcaatgctcgcgggttgggccgtgatttttgtgattcattgcgtgcgtgattatgtgcgtacgctcgtgtgttgcgtcagcgtgtaccaccacgtaacagagtttcatgcctactactccagtttagaggtgcaatggatacaataccggttaccgctgggttttcttaccccgtatcatctccaaccatacctattcgaaacagtatcctcccacatagtcactgatatatggatccgtgaacggtgaggctcacatgtcaattaccatgtccttctgactccatgttagaaaatcgcaatcccacctatccgtaggtacaagattctctctatactgtatatgtgcgggcaataactacccgttgcaggtcggactcaggtttaaccaaggtcttaggctaactcaatgcatgttgagccaagacatgtctttttacatttgtgaaaatgcatggtttatatggggttttaggcctaggtccgacccatggcctaagtggctcatgacctaggtctgtcattgacctgccgggtaccgatacacgtgacactttgagcacttgcaatttacactatagtcaaatgattagcaatcatccattaacatcataatgtcaggtatacaatgattttaacatcaaagttagcaaataaacagaccaaacaactacattccaaaatcaagaaattaaatgataatgccatacaacagactagggaagaggttgagaggttaaaggagttttatcgaatgtccccgaagagacaggttaaaggagttgggagtagctatatttatggcgccatatttttcaccaaaaaatagtcggcatgtatttatattgtaagtttctaaaatatatatgtaattttagtgcatttacaatgtaaatctcgaaattacatatgtaattttagtgtatttataatgtaagtaccaaaattacatatgtaagtttctaaattacacatgtgtaattactgtgtaaatagactaattgcattctttgatgaccaacacgtgtcacgcaaagcaaaaaggagtcaccaacttaggagcaagttgttcgattagcttatcagatgtactttacatgaatcgtgaagaaaattagatggtagatcgacaaactgactgtatttagcctagaaatatgtcgacataattttagcaaagccgaaggagttttatgctacagatgataactattggcagtttttctatgcatacggtttttttaaccatggattagtgggtgtggatggctaaagaataaacccgtagagtatatccaatactcctcattactataccatatggatataacaattttttctcactagtaaaaaactgttgggtacttgggtctccaaacgcggaccctcgtcgccgtatctactccagacaatgcttatacaagcttttaagaagatgttttcaccttgatatttatgttttcaagtccttaaatttcctttgcctggtgattttgacttgtctcgtcacaaagcaaaagagcagcaaaaatggaatatgttttcaagcccttaaatttctttctcgtgatttaaacttgtttcgtcacaaagcgaaagagcagcaaacatggaaaatatatcgcctcaaaggcacaaaaacactcttaaagaccatcagcctaaaccttgaacttttctcacatcgataccatagaagtttacagttaacacccagttcatcacagaattgagaggcaatgaacacagctgttgcaacttgcaagagacggttggtatacaatcatccagacatccagtacagaccatgcagtgtatttctacggatattttgagcacagcttcaggcatctacaaacatctcacagccagtgacacaaaagcagttcttcattgtgggtgtcactgcagaatctggaaaaggaagaatctcacacggcgagtcgttttccaatttcggataagcagcgaaggcaacatttaacgttactttccccgccaaaaaaaaaaaaaacatttaacgttacttgtaaccaagcaccgtgacagcgtatagcttgcttgtccaggggtgaatgcccacaccagcaagcaaaagatgggcgacaagaattcctgcagcggaagcagcttttcatcacagctcagcacctgtgatctctgtggctaccggccaaggccatggtccatggctgcctcatgattgccaaacattaggctgattagggttcatgattaagtccctaatgatggcctttaactaccgtgccttgctgaggaattccatctttaatgtgtcctctagttgtgagaatgtcgatgagaagatacctgaaaacaaaagaacagtacttttttgtcattgtcaccgagataaaagaaaaactctaattttgtgcatgtactagtaagccagaggagctatcatgcaattggtacaagtatcatacatgcagaagttctgtttggttcacatccagttgcaaccactattggttatacataatacaattggaatttgagggaatgagctaaatgctcatgctgcacatgtatagactagagatgaacagagcaattatataacctaaccaggtttgaaatatgacaagcaatctctatttaacagaaagatcagctagagattcttgtctgcttgtcctactatctatagagcttgatttacttccctctacaacctgaataattgtatcctcaattgcaaggacggtcagtcgacagtcaataacaaaagcagcagcttcaatgccaacatgccatatgatccgtatctacaggctctgcctcctgcaaacttaccagccaaactctctcaatgcgtcaatggtccctagcgttcaagtgtcatttaggagtatgtctccatcgtggaattagcactagcagctgtctagagccagtgacaattcatatgctagagccagctaggcatcagtactactgtcacccttcttttactggatagacaaccaagacaattctcaggaccgtttcatgactataggaccaacacagcttggcagaggagggcatgaacaggattctccatctcgtgctgtacaatgtacatttgacaccatttggtggatcaaaattttctactcgatcaacagatttcattatgattgagcgtttatgcactgtaaaacaacctcacatctacaaaagcaagtgccaatcatcctgaatagcaagagttagtacagataacgaatcaagtttcagctccccatcttgcccttttagtgttttatgcatcctatagaattaaaaggacacaaatagccgatgatacagacatcaggggatttatacatgcttgaatctggaatggagttatatggcaataggggaagataaaagaggttatcactgcaggggttggaacaaggaactgcataaacatgctgcagcagtggcaggagaggtttcctgcagatgcacgaattcaagtgatttcaggctactcttgtgtttaagactcgatgccatcctttctgacttcacaaactggttggtacgttatccaaatctctaggttaacgtggaagtcagctctttccacgcatgccagccagctgcatgctaaataacttgagggtggacatttgtattttctgaatggccacagaccatctggttggtgcccatgattaagcgccagatgctgtattcgttaaaaatcatcacccttaaagattcactcatcaccacttaacctgaatgctctcctgaagatggctatttcaaaggcattgtgtctgctgaatcacatggaattcggcacctatatactagacaacataaatctggctacctctggaaatttcttcaccagtaagctgaccaatggagtaaccttatgtcagttcatactgaaatttgcccctgctaccataaggaacggacaaaatcttacaactcctctccaaatctctgtccgttggtaacaaggctaggctgaggcatacactcgaagtctgattaagatgcaaaataggtttctggaacacaaattaacacatgatgccagaagaagatgggtttgatgggtgacagaaagctttggggcatggacagcagtgagccaatgatagcttcagggtgccaatgccaacggtagttgagggagggtggtagccaggcaccagtgcaccacgaccgtggctggacagtggctacaggcatacagtaaaatcaagtacactgttggcatatctgacaagataaaagaagagtagatcaaatgaaggtgatggtagctggagaattgatgttgctggcaagagggtgatcactctggttgcattgggtgggaaagatagctggaagaacaatagtgagagggaacgaccaagcccccagaggatggattgctgccatgtcacattcatgatttaatagctcaatagttcccattttttagtttttttatacacacagatgaagcatccgtgactgtcagtttcacatggaaataaataatggccaggccagaggcaaagtgggatgccattagactcaataaaatagctcggaactcaaatcaacaacaatggtatatgcactcaattgaaatataacatacagtgaaatttacacaaaactacaagatcaagaaaatggcatgttatgcattgatgaaaaccaacaaaggtgtatctgcatgtttggacaataaatgtgatatcattcacatgaagaacaacgattacctgacagtgctttgttcaataatgaacctctgactaggagtgtgcctggcatttgttcaaacacctatatggaaaaaatacaatgattttttttttgaaatatacacagaaacaactgacaagttcataggaaaaaaacataactaggtaactgatgaacataatatacttcaatttatcctaagcataccgaaatacggaaggatgttccagtaacaccactatgaagctttgtagagttgccttctacagaaccagattcatcgtgcaacattgcagcctgagcctgctcatctgataaggtaacctgaaagaagagtatttcatacaattcttggagatcgatacactatagaatttgtacaacaacaaaaaggtctgtgtactggtgtaatttgacagaaggaatatgcggcagattaataaggaatcttacatcaatagaaaataatgaagaatcagttttacacgatagattagaagcatggaaaaagctctcagctgacttcagcacttgaaatgcaccatattcacgtcgaaggccctgaaagccattatgtaaatgagatattgaagcgaagaagcttgagaaggtgcaatagtagtggaaactcagtatcaataactcacagataaatataagttggctgattagctctttattaataagaggaaagggcgcaggtattgtccaagaacatacaaacataatggtagataagattcgagttggatttctttttcttttggttgctaaagaaaaatagctgtgcaatttatggaggtaaatgataatatgaatcaaagggacaaaaggtgacgtgatactaacttgaagcataaaagaatagttggcttttccaggtgtactggatctaatgaccattttccttggagcaatgaatgaccatgcaaggccccatctagctgtttgaccttgcacgaattcagtagttttcacaactgacaccccagcttcacgaacttttgaaaccaatatttttagatttgcttttctgccaaccatcgaagtaaaccacctaaaacaataaaaggaacaatgagcccagagacaattaaaaggctattatcatgttaggttagtatttgaatcacctgaaagagttcttaagggaaacactgtcttcaattatacgagttataaatgcctgttcaccaccaggacaaaccatctcttcagcagttccaccgcatgaagtttttggattaagaccagcttcctctatactttcaaagaaaggaggattgcacatacagaagtcaaagctctcactatccttcacaacgccaagaaggatagatggtttcgacctcagtacaccatccactggcttcgaagtgttctccctggctgcttcaccatcaactgcttcagattcagaagaacaggacattttgtttgcatttctaatctcaaccagagctgctagctgtggattgctctccacattctttttagcccattcaagggcaacatcagtgacatctacaaacacaggggtaatccgattaaaagagaaatgcaaataaaagttcaactaacataagaaactctaattgatgctttgcaaaacttatattgtacatgatctaaagcataccagatccaacaaagctccagcctagtaaagaagccccaagcagagggtagatgcaattggcacctgtgcctatgtcaaagccccttacagtcttgtttgaactggatattggtggtatgaggtctgatgagagaagatcctcaatccagtggatgtaattggatctgtttggcacagtagggcacagctgtccatccggaatccacctgacggtagttagcgacaaatgtcatgttcatatattagattaaataagatattgatcacaaaccatatgcatgacacttagccaataacatattgagcactagtaaatattttgcatgacaaacgaacatcacgattctctctcttcaaataaacatggcagctaaaacttcttcagagaggccatttgaattttgaactgttagtgcaacaatagtaccatttctgatatagtagcatcatcagaaaaactactgaagttacttagaacaatcaaattccctcaagctcactcctgatagtagcaactagcatcaacagttcatagaatgacaaatgagacgcaacagcttgagctcgatgctgcggatggctgaattgagtggtaccctagtgattcttcagcagagcaataccgggatgcactagaagcacagacggattagggttcagggaagtgagcccagagagtgtaattagtaccaaccagttgacgccgtggtcgtggaggaggaggacgcgcgtgagctcgcgggtggcggcgaagtcggtgaagtcgatggaggcgcggcctccccgggagacggagacgaagggggcgaaggacgggtagagcgacgccagcgacgcgaagtccggcgccgcggcggcgtagcggttgcgcgggtggatcgccggcgcctccgagccgtcccgccgccgccgcttcctcccaccccccatgacgtggatggaccaacggcggcagagctcgagcagagatcgccggagccccgaagcgccgcgggggaagcgacggcgagcggcgcggcggcgcaggtcgggtagaaaagctcggggttttctccggcccaatccttcgtttagatctttacatgggcctcgagtccctatcacggcccatccacaattcatctttgtcaaatgcagacatatgtttggcagggcttcagttccagcttcatctatctcgaaactgaagttcaaccaaatggtttggagtagattaagtggtatgaaaaactatactaagaaggtgaagcggtgttcagctccacaactccgctttaaactcaactccaggagttggaagtcctgctaaatagaccatagcatagtgtttttgaaattcactgagaaaacaagagtatgaagacatggtttgtgttttcatcctacaatgtgatacaggtaaaaatgaaaaagatgtcagtgtcatttatcattaagcaaaatttataaaccaccaagtttagggtatctgtcatgcaaaccacaaatattgtggttttctttaagaaaccttagattttgagtaaaaccacttagggtgtgtttgaggagaaggggattgaggagattgggaagatacgcaaaacgaggtgagctattagctcatgattaattgagtattaactattttaaatttcaaaaatagattaatatgatttttttaaagcaactttcctatagaatttttttgcaaaaaacgcaccgtttaatagtttgggaaacgtgcgcgcggaaaacgaaataaacaaactcactctctctcaccctctcgaatgctgcctaaggaaatgtttggttgatgcctaaccttgccataactaagtttaggctagttgtggcatggtggcataaatgtggcttagaaatagttggccacaagtgtgtcatgcttagctctaaatttgagagcatgacatgtgggtcccaaagttaagaaagtgtggtataacacaattgcggcagcgaaccaaacacatgcctaaaaaactgtggcatggctaaagtgtggcgtggcaaagtgtgacaaccaaccaaacagccctaaatgtttcgtgaaactttgtgtaggcttacattgttcatttaaccaaatttatgaacagcaattgtgttaaaaaaaaggtagtatgagatattttttttaggtacatatacacttcaaccatattttcaatcaacatcgagtattatcaacagtatggaggtacgtgtgtatatgtaatcgactgttttatatcttttttaagtggaagcggcaagagtattgccgaatatattagaaagatagtgtgtgaccctgtttataaggaaaaccgggccaaataacatacaactgcgcgttttgctaaagtgaaaccggcaaaaattttacacagaagacacaaaagcctaaggcaaacacaactacaaaccgcataaggccgtgggaagagtaagatcctaaggcgaagccggagatgaacaacgacataagccgctgtcgacgcccgacctaaacagttggactgttttatatcattattagcgggggattgtattaagtttttcaataatccagcgcaaggataagatagaatataagatgacaaggttgtatttgaactttgtattggaatatgtttattaaaacattttgcccaaaatataatacggatgtcttaataaaaccggttttgggaaatttaatatttatcatgttgagcaattggagggtttcaagatcattttttgcaatggtgagatttccttcaccaactattttttgttattaaaagggaaatgaagtcatcttgtatttatgtaacacaacaaactctccacatcttcttataattttctcctctgtgtttagatcctgaaatgaattggagatcaggttttaggcgccacagccaggtgcatggagattggagacaagacgaaacggcacttgcctgcaaaaagtagtggatactgtctttctacttctccgttcttccaatgatgaattggtgattggccttttcaaggtagttgcagcaagtatctatctatatatcctgaagatgacaattggaatcgatgttcagtgcgtcgtcaccaccacttgtcatgctttcagaacgtcaacgacacacaacctctcgttttttcctttttgtgaagtaattttggcgaatacgagcaccatgagaacagaatttcgcacaacttggaaagctgttcttcaatttttgcgattcctaacgcaaccgcgtgtggaaagagagaaggaaactaaagtgagatcgatcgaatcaagcatctcctgcgtacagtagctgccagccatgatcacttgtggcagccatacttgaggcatctcgatcgttttcaggacgtctctggcttgacagctgagttgagattattcaggttgatctttttgcttggttcagatttcagatccgtcagacttttcaattctgttttcctactcgttttacaggttctgaaattgccaaatgccgaccaaacgaactcaacacaagacgtgattctgttggtattgggaggagataggaaggaaaaacctgtcctgcaaatgcaaaaatgcaatatgccatattgccttccaatgagagtatgtcagcattcaagcaaacagccaaacacagattatagttcgtcccatagaggctggatgtggaacgttagccaaaaactggatttgtaatcctaattttaattcattttaggcgttccttttcaaattttttaaggctgtgtttagttccttctaaaattagaagtttgggttgaaattggtacgatgtaactgaaaatttgcgtgtgtatgtcaggttgatgtgatggaaaaagttggaagtttggatctaaacacagcctaagtttcggctttttaaccaaatatcaatatactaaacgcctaccgtaaaactactttttcgtaacatcgtttttattctatggcttataactcgaagcctatcaatgtgactagtactattttattacttaatgaaacgtctatacattatatatatcaaaatgttataaaaccgtaaaaaagccatgatatcaaactgacaaaataatactctatccatcctaaaatataaggaattttatgtggatgtgacgtatcttatactttgggtgagaggaagaggtactaataccactattatattgtactccctccatactcgtaaaagaaatcgtttaggacagcgacacggtttccaaaacacaactttgacttcttatttctataaaagtatttattgaaaagtgatatatgtatacttttataaaattatttttcaagacaaatctatatatataatttttatattttcaaactcaacaacttaaaagttatttatgatttatattcctaagatttgatttaagcattgtcctaaactactttctttataagtatggagtaatatgtattggtaacagtacagtatatacagcagtagtagtagaatatactgtactgtagggggaggtttgggccggcagaggaatgggccagtcgcacatgccgtctgcgtgcgcttcccgcgacctagaatatcgcccactcgctcaaccgcatatcccttcctaataacctctccgatccgtaaacctcgcccatgcgccacgtcccccctagtgtcctacctcccggaccacccggtcttggtagaccacgtccacctccccaactaaaatatcctccctaacccaaccaccccacggtaacccacgtacttaacgcgagttaccccccgcaaagatccaaccgcctctcgcaccgcccgcctgtccacccacgcctactgacgaacccggcccacctctccgggccccaccatgtcgtcaccacgcaggccaaaatcggggagagcgtgtcgtggtcccacctgtcattggcttcgtgggtgggagcgggtcacgtgcatctcgacatgactcgaggaggtaaccatggttatggtaaccccaccgccttgacacccgtggttaggggtgggggcgcgcgatgccgccacgtgtgacgatcggacggctgcggagggcatcggggttgggcgacccgcctatttaaccgcgggggcctcgtcttcctcaggccacgcagcgatctgaagtgaaacagcaaaaaaaatcaaacaaaaagaaaaaatattccccatctgtgaaattcgcaaaaccctagcgcggcggcgatgtcgaacacgagggtgttcttcgacatgaccgtcggcggagctccggcggggcggatcgtgatggagctgtacgcgaaggacgtgccgcggacggcggagaacttccgcgcgctctgcaccggcgagaagggcgtgggcaagagcggcaagccgctgcactacaaggggagcaccttccaccgcgtgatcccggagttcatgtgccagggcggcgacttcacccgcggcaacggcacgggaggggagtcgatctacggcgagaagttcgccgacgaggtgttcaagttcaagcacgacagccccggcatcctgtccatggcgaacgccgggcccaacactaacgggtcccagttcttcatctgcaccgtgccctgcagctggctggacgggaagcacgtcgtgttcggccgcgtcgtcgagggcatggacgtcgtcaaggccatcgagaaggtgggatcccgcggcgggagcaccgccaagccggtcgtcatcgccgactgcggccagctctcctagatctgtgctgttccccttcgcctttcgccagtatcagtcgtcttgagtcgtcgagtccctaaataaggaggaggtggtggtggtgttagtctttttatgagttcgtgtcgtgttggtgagatgagatcgcccatggtttggttggattaggcggagttcttggatcgattcggtggagttggatctgcgatccttcttggggttggttttaaatcttaattcgtgtcgctgcttctatgatatcgctatcaatcaatgagaacatttgggatccgtggattttctgtgatcttacacctgtgtggttgtttgttcttgcgacagtactaacgttcttgcgattaaagtagattaaactatcttcgtgagatgagcggtttgtcgccgcgtgatgcctgactttgatgtgatttgtgggacttcgtcttatccatttggttattattatttttttattttgcaccgaggctctctctctgatgtgatccactgtttctgatctctgatgttaccaccaccagagggtaatttgatcgcttaccagatctctgaaattatgcttaccggttagaggggtaaatgatcttacaagttgtttacaggttcaagaggtgaacataattgcgtttcaccagaggatactagaaccttttttgtgttgaaaaatctattattaagggcagcagtactaaactgaattattatgtcttgaaaattctattattaagggcaggagtactaaactgaaggtcgccgttattttagtgaaaagacaaaagttgcaacacctgtagtaggagtagtactccactttgaagaatgaccattctgaaatttgctaggtacgctgtcactgccatcatcttgctgccttgcctcccacaaggccacaacccagcgtacaattgtacaatcaattctctctgttttttttaaatcacaactttcattagccatactaataactccctccgtaaaaaaaaaagacaaaccctgatttccgtgcccaacgtttgaccgtccgtcttatctgaaaaaattatgaaaaaaattaaaaagacaagtcacgcataaaatattaatcatgttttatcatctaataacaatgaaaatataaattataaaaaaatttcatataagacggacagttaaagttggacacggaaactcagggtttgcctttttttttacggagtagtacttagtactatagtatttttttaccgcgagcacacaatatatttggatggatcttagatttttttgataaacttagaggttgttcagattgatataatttcaaagcataccaattttaagtaaagttatcaaaaacatgcatccgtttagttttttaccaattgctaaacacataaaaaatcctgtcaaaatttagcaatattgtcaacttgcaaaaatttgttcaagtttgttttgactacaatatgaacatcttatttttagcaacacaacggtagatagctttaccaaatatattttcctatactagcagtgagacttactccctccgtcccaaaaaaaagacaaaccctagttttcgtgtccaacgtttaaccgttcgtcttatttgaaaaagttatgaaaaaattaaaaagataagtcacgcataaagtattaatcatattttatcatctaacaacaatgaaaatactaattataaaaaaattcatataagacggatagtcaaacgttggcacaggaacccacgttttgactttttttttttataagatggagggagtatccttgacatcaatcacgaaatttccctcatcccgagcggtacgaatcgcatctcgtggtagcaccaccagtcaggtctagcggaacaaaaacggagctagtcagatttggaatctgtttatacaattccatctccatttgatcgcagcatattcctttcctgttgcaattaacgctagcgtcatcatcacaaagtgcaactcataatctcatacgcagattgatttgattctccgtgtaaggtgagtttagttccaaacttttttttcaaactttcaactttttcatcacatcaaaatttttttacatacaaactttaaacttttttgtcacatcgttccaattttaattaaattttcaattttggtctaaactaaacacaccctaggtaaaaataccgacaaattaccatcatcttccgaaaacgtgcaagcaaaaaatggcaaaggattgtcatgaaagtttacacgctcggtcgatttttttctccctgtgtgtgtgagccaggtgacggtggggcccacatgggtagagagaatacagggaaaagaggcttgggtcccacgagacagcggctggtggcggtgaaaaggaggacggcgcgcgagattcgaggcagcagaggagggttttgtttggcgtttggctcatgaatgaatggatggatgagggtggggcccacgtacgtgtgcgtgcaggtccaggtcgcgttggtgctacgcagtgtttgacccggggtgggtggttgggtcgggttgggcgggtcggggtcgccgcgcgcgtcggggatcgcgtcgcattggtttggcccaccactactattgctttccctgcccagcccaaatgcaaaatgatgattggcctggccctcgtcgcgtctcgcctgtcagccgcgaaaatattggctcactccgtcccaaaataaatcacagataacatattattatattttattattatataataaaataaatattaagcataaatattattggatgttcaaacgttggacatataaaccacaactacacaacatagtactatttttaggtccccatcgtttcgcttttttttctggcttattaggaaataaaaataaatttgtaggtaaaatttttatatatgtgttcttgatgacttaaaagccaatgctgaaaaagaaagtacgttgaaaatatctcaaaatcaatctcaaaattaagtttgaatatttaaaatttggctttttctttggcttattaggccatccgatgggagccttagtgtatttttttcacgttttaaattgatcttgctgtcaattttactatgcataaaggttgacatatattcctagatataggtacaaatattaggattcaaaatttgtatacaatttaaatgtaaatatacttatagttattatttgagaacacgttgcataaaaaaaagtatagtacgatactcactccttcgaaaaaatctaagacctattttatttttggtttctgtaaaaatctgagtcatatttgtagtcaacatgtgctaaattaaattgttgatcggaaaccaagaaacaattctagtacttattgattgcatgttcattggttttgccatatagtgagtgagttaattgcttcttggttttaatgaaaaagaaatagatctcatatttttggaaggatccatctacttttgatagtcatatttccaaatctgaaaattttatttttgataggcatattttaattcaacaacctatcctcttaatgaatttctcggatttaatgcatgactctccattcttctacacaaaattggctatatgggcatcgagaaatgtaaatattaatgaatcgcttgtttacgagaaatgactattagcatgtttaaatggatgataaatagaataacttattcttaatctatatgccaagatgaaatattactatcaaaagtagatagaaggagtactacgttctagcgctacgagtttgttttttttttatcatacgagttgtacttttatacccaaaaaagtcactctgtcctgtcctgttgaagattacagtactggtgggttgatcttctagaaacagaaaatatactttacaatggattagtagtatggtttggaaattatggagtggtgacgagtagtctgttgaagcagaaatcgctggcaatcaaaagtagattagaaacagtggatttggggcgtgatggcggtgaggttgcaaccgcgcaagcaacggcgtcaatgcctccgccggtctgccgtgattacttcacctgcgaccactcgtctgctctgcgtcattctgcctgacatcctcctccgttcttgtcgctttcacaacgtggaaaatgagggctccattattttgtacgattttcgtaacgtatgaataagaataaaaaaaatataggaacaatatgaaaatatatgtgtaaacttaagaattgaaaaacatcgaaaactttaccatgtatgttcagtaaacaatccaaaaaatttaaaacattgggttggagtggattgttttttccccctataaaagtagagtgataataaattcctttttgctggatccctttaaaacagatggcagtttagtgtcactccaaaggatcccatatttctctatttttcctttaaaatttctttgaaacgaatgagcccggaatggctcatcatcttccattcctcctctcagttccatccaactcacacatggatagagtggagatgcatcactgaacacaagctagtttcagaaacatcactgaaacagccaagcatgctggtggtagtatctatcacaggatttaggagcagctgcaggaagaagagaattcggtttcggtgctacctttcatcctctgatctcagctgtgttcagttcagctcttggcattgctaaaaggaattgttagttctatctagttcagttcagctctgaatatgctggttttacgtttgttgcagatggtgtctgtcactgaagactgaaactacatttaaactgtatatgtatcatgcacgattagatccagatgggctccttttctggcagaaaaccatatacatcaatacatgctggttgctggatcttcatgtctattctttcctgctggatctactatagcttattactagtagatttcccagataatattacctcgatttttcagatagacaaattctgtctttgcacagaaccacacagaagacgacttactttcttcaccctgcatgctggatatatagcccttcaacctataaaatcgatggagatatcatcatcaacagggaactatcatctcatataagttaaaatttgaccttatctgatctgccataaactgaactttggttctacttagtgattatctgggaaaaaaattgttttttatccatcccacacatacctatacaaaatttatcaaatcccaatgcaatgtatttatcctctacttttacaaacttcagtagaataattattttaaaataaatttattttgagattcaaaataaatgggagggatggaaaatgatcatattctgaaacggagggactgagggagtattcgttatactactgctgcttatcttctcttctgggatagggtggcactgtggcagagcatattgaacgttctttggggagagagcccagtttgacaaatagcccaaattggcctactagtcactgggcttaaagctctgagcattttttattgggctcagttcagaattatcgggttttatccctcaattcttcagcttttgatcacaaaggaataagtctattttgccttcctcatctcttgcctttgattgaatcatatctctcaaccataaaactataggtataatgtctcttccaacttcagaaactggtgcaaaatgactccttgaatggtttaggaagctgtttttgttgtcgtgataggtgagacccacatgtcagcgactttcgcctatctcatcctcttacttacctctctcctctcttcaatcttccctcctcctctctcaccttctagtcgctcacctgttgttttgatgccccaacctcctctccctcgctgctgcagccactgcctattgctgcttttgcttcaacaccaccatcgcaacctcctctctccctcatcgtcacagttgtcgtatgttgctgctgctgcttcggggaagtcgagggaaatggaggaggcgctcgcggccacaggaggaccgggtctaacaggcgaccttgggagggtaggatccagctatagggcgatgtccggtggaagagccaaggtgtcggtgaccttatctccttccgagtagcggtggcgccgacatcgagcttgagtggccacattgtctcctctccatcctctcccgatcatcgcggatgacggctttgccatcgttgggcttgagctcttctttatcctccactaccacgccatttgcgtatcttgcccagaccgtctgagcccaaggagagatcttattttgcgcccccggttgcactggatttgattttaaaatcaccatccgcgtacccgacctgattttgcggttaagagatctgattcaaccgagggcaagagacgagggaagcaaatagatttatcccttcacagaaacatgactactgactagtgtcttatttgggtgggcttcaatcctggcccatccacatgtatgggacaaggcctaactagcacatttataattgtcttgtttttcatatatccagatatctatttagccataagtatggcttctttgtgagagatttaccgataaagatctgattattcctaaacggcaaaataggcaggcccccagcggaggactcatcaagggctaaaatcacgcgatgaacaatatcatgggccttaactagcccttgtcccctttctcatgctgaatcaaacattcaaatcagattcgatttaaatagtttcaaacctttcaggacatcctttcattgttctccactgtactggtaagagtaaaacaactgtactggtaagagaaaaacaatacattgagaaaactaggatattgggatattgtggtattgtcttgctcacaaaaagaataatatatgtattttatttccctaaagaatgatgaatatatatgattagcagttgctatcaatcttggctgcatggccaaaatacaatactctcctatggtaagctagctagaactgctaaccagtctcactcacacactattgcaaaacaagatgaacactcgctcaactgtttgatgatgaatatagaagctaacaaaatttgtaattactaataattaaacctttaatcactagctactttgctagtagtaatccgatcgaattcttcttcctcctcctcttcttcttctctcgttgcactgatccaaaaaagttggatttctggcaatggccaatcaggatttcattctacccgcctcatcctgctcgccgcgctgccgccttgtcacgccggatctgttgccgccggagccgcgcctccgcggtcatcgccgccttgcacgccatcgccgcccgcttctgtcccaggtggtaccactccgccgccgccgccgccgccgcggccttggcggcggcgacggcgacggcatcgtcgtcgtcctcctccggcgcccgcgccggctcgttcaggtccagcaccggcgccggccggacaatgtcggctgccgccgccgccgcctccacccgccgcttccgattcacctcctcttcctcctcatgctcccgctgccgcttcagctgcaaatagtaaaaatgaaaaaaaacgtaaaaaaagagaaaatgaaaaaaaagtaagatgaggttgactccgactcaattggggattattcggaaaggtcgcatctttctttccatttggactggttgccaaccatgccggggtgtcaggtgtgtgtccacgcaaacacctcgaccaaagaattgaattgaagcgcaagaaaagagtagcactagtgaagcattgaccttatcatctatctacaacaacgatgaatcgatcgaacataatttgtttttacgattttagaggatgcaaaaattggagatgaatcgatcgaacataatttgtttttacgattttagaggatgcaaaaattggaatatatgtagctgtaaatttttttaccttgcgctgcatctgcttcaatccgtcattggtgctcctcgagctctgcagccggactctgtactcctcgatttgctgtttttttattcaccacaaagatgaacaagtgtgtcaaaatcccaacgatttttgcgatcgggatagttgaactcgagagcgaattcttcatccatccattcagttggagagagagataaagacttggatagatagagagagagagagggtttgataaatctcaccttggatagatgcgagttttcctgcgacaagctcgcgacgacggcgcgctgctcctcaacccactgatgagcaaagcagggaagcaaaaaagaacagatcaatactgcttacaagctaaaatcaaatcgaatccgatcgaattgggaggagaagagagagcgagcgaatcagatctcacctccgcgtgcgacgccggcgccttcctgggcggcgccgccctcgccgccacgtcgtcgccgctgctctcgtcggggacgaggaacgcgagcggcgtgtcggggctggcggcggcctcgtgtcgccgccccacgtccgcgggcggcgccggcttcttctccccaggcgtcgtcctcggccggcgacatccccacgaggggatctcctcgcgctggacgcggcgtctgcggcggcggcgatggcgcgcgcgcacgaggtcggccaggtcgcggaggatggcggccacctcgtgctcctcctcggtgaacgcctcgacgacgacgccaccgctgctcgccatggcggcggcggaatcggcagcgagagcggaggagagatttcttcgtgagcgaggcgagagagagagagagagggagagagagctgagctgcggattggtttggtttatagcgagagcgccacgtggcagcggggagggcgtggggattaggtgaccgcacggtggactccacgggtgactgactggtgggtccctggttttagcgactccgttatggttttgcgtgcggagggagtctggttttaaaggcttcacaataccgccccctgtttcaggtttttttttttcctccgtgtaaacagggaaatctcctattgagtttacatgtcatgaatctaagcaaaaggcttaatttcaaaatgaggggaaatctagtgagttactacaagggaactgtactaatttctaggaaaatttaactaaattttccttaaactagcgagttcgacacggacgagcgatcaaataagatcgagtttttgttgagagcagggatttaataataattttgtaaacaatatccatatgtttcaaaggagggctgaataatttagcactcgcattttcattaattacgcccccatcatttttagattatttgcttcacgctttttaaaatgttttcttaaagaaaattttccctactacatttgctaaaaccatatttgttctaaactattatttgtttttttattttttttcaatgcatctaatttcttcatataaaaaaagtacttcactacactcgagtacctttcgatcgagcaacataaaacatctcaaattaattacagctttttgccacccattggcatctgtgactgtcaaatgtcatgtcaacttgtctgaaaattcctttttgtcagatgaacacacagaaacagcagcagtgacagttttgctatgctaataagctagatcaacctcagctgcggcggctgtctgctgccgccatggtacggcgagcagaagagctccatctgcggcggcggtggcggcggcggcgcaggcagcacggccaccggacgcagggaagagacgtcgtggagccggctgctgtgctgccacgccgccgacacggcggcggcggcggcgtctggccttggatgatggtattgagggaattgaaactgccacatctgctgctgctgctgatgctgatgctgattgggcatgagctgctgctgaatcttcataatggctgggtttggattgcacatgtactgtggcatctgctactcgatggccaagaaacaaactgtgatgagaaattgagaatacaattgaatttgtatagcaaaaaagaaaacaatcatgttgtttgcagtctctcttttatccacatttcgttttgtcggaaaaggaacaggctatgatcaataacgatagaagtggttttttttttctgtattgtaagttgtcacaagaaaaggagtttgtactagtaactgttatgagatgcctataaaaaagttagtggttgtctataaggcattgacagaaaaacgcctcacaaatcttgcaaattctaatagtactattaatgatgtaaatctttcttttgtttcagaagcaatgtgcaaggacaaacctgttgaagtagtagtgcagtgtgcgtcaaattccccctggtgtaagggagatgctgaattggatatggcattgcaccgcggggagcgatcgggggatgtaaatactgaacatgctgcacccctgataacgccgcagaagtgggcaagttcagaaaattaccactgacctgaaagaagcaacacaacatctttcatatagaaacagagatagaaggaaaactgaagtagctgagatggttgaaaaggcggtcactgctcaccatcttttgtcgggcaatggtcgtgtcgcaaacactgcaagatggctgaacaggtagccttacatcgaaatgcaaggcgtagaacttctcgtcttgtgcaccattcttacttatggtagaaccgtctggagaccttgaaatgtgactgtgacaaacttcctcaggttttacccggttttgtgatgccttctctttgtccaaatgcatttggatgagatgacacatgtagacatgggtaatgcttctcttccatgtcttcgagggggtaccatttttattaacgagggaaagctgcagatataaaatttgtcagctcagtagtcaaagaatacaatcatagcagttaacatataaatatcccttcatgatatcagccttaatagaacatagcattcaacttaggagagagagtttccttatccatttattctggaagaaaagaaggcatagaaaaatggatatgttaacaatacttacattctcatgttctccagttcctttcacagtttctgcggcagtattattacacgacgccagtgtgtttgaagatggcctggaaaagggacatatttagagatcgatgatgaaaacaacactgaaggtttaatcgaaagttacttgatcaaatacctatgcgaggcacaaggttttgaagtctggaccggtggcacaatttctgacaatagtgaccatgtattagccaagaaatagtagaagcatcgtgactagttggacaaaacggtatgaactattcaacctataaattgttatgacactataaagctctatgagtaccttgggcagtgttattcttgacatttttcctgtcatgttccagaatatcaggcttcttagaattttcctgcagaaaattcatattggggagaaagcatgaatcgtaaggacagactgaaaagtgaaaaaatgacaccgaggggcacaaagcagtaccaggcaccgaggggcttctatctttgtgggatgaattgtactattatcaaactgcactttcagttgcttccgactgcaaacagaaataatcaaataaacatggagagaccatttaccaaaatacaatacgagatacgacagccatgagcaatttccaacctgttattgtagtctttagatgggctcggtaaattcgttacaattcccaaagaaatatcatgtatttgcccatcatttgacaaagttggatttgtgttgttgcaggtaccaccacaaggcacatgatttatttgtgaaacattgccagttcgttccactggttcatcaagggcaggttggttagctacttccgtaccggcagttggcaatgccgatattttctcatccacctttgttgctcctgtagaagtaaccagtcaattatatatgcaacacattgtcaaaaagatgctgaatatagtgattaatacgataatagcaagtcaaacactcaaactgcaaacatacctgctgaataagacactgaagtaacatttaaatctaagttatcttctgccattcctctgtcggacgacagttcacaaagatggggtatttgagataaagatagcaaagcatccacaactacctcctcctccttcgaaaaatgattcgccaactgctaagcaagaatgaagaaaaaatgattcattttcaatatttggtcctgcctcttgacaaaatgaagagatatttatgagcacaaaaacttaccggaattgcattacatcttgtttctcgatccataaggaaagtctgagagctgatagctgaaagatggcgcctcttcttgacatgccgcggtgatgtagaaacagtttgactggcacgtttatttatggctgaaagtagggggaaaacagaatttaaatattaactcagaaatgtaaatctttaatctataatttgaactgttattttcagtactcaaaacactttagttaataaaacatctaatatgtgtatgcaccagagctcacggaattaaaatgaaaatggtatgttcaaatatcatagcgaaccatcagtttgggttttgtgttctcacaggtgaatagtacccaccttaattaaaaaaatgcactctatattttctatcccgctgtaaaatcttacagtattatatgctaaaagtcttgcgagaaaaaatagcacagcatattcacttagccccaccatagatgtaaactaaaaggaaaaggcatgataaaagcacacgaaataagttgtccctttctatagctctgagagagaggatatacagtgattagtactcctacctgatcttaattttctaggaaccggtggatcaatagcatcacaatcctcagccacctttgaaacagaaaaatgaacaaaaaagatgtacataaagaacaggaagcaaatgattgaacagcagagaaggctaataaacgggacacaaaccttcccaaggctcttcactctcttcctactaatcagactgctgaagctagctgtggtcagtgaggagagcactgtatcatcgtagtctccatcagaacctccttcctcccctttcatgtccatgtcagtgttgcttaatctccacttcaaaacctttgcctttcctttcttctgcctagatatcaggtttagatctccaccttcactcatatttttgttgttgtctgtaaacaatgtacagaggcgactggcattagatatcgtgtgtaactttgtactccggtaactaaagaattttatcttttgaaaggttgtaggtacagtttttagtttcaccgtactccagtttagataaactaatcgtttagaaccaataagcacttcatccaagtgtttagttcagagtctttttaaatagtttttgttgacaaaatatttttaaatagttaagaatcagatgacactcttggaaataatgcactattcatctgatgaaaaggtgtacagctacagaacctgtatattaaaaaaaaagaaaataaaagcaatatatagaatcatttaaaaaggaaaagcaggaggaaaaataagctcattggtgaatgtcatatcatgctgcgaggagaactttgtgttgtgaaaaggatagtaatcacaaggtatggcttggggtgcatatctacacgtaagcagtaggtgacaatcgttaagacccaagacaacatcataatattttggagatttcttcacgaaagtttaacctcatcgaaccatccaaaaccagaaaggtctaaacaataaaactttccccgaaaaaaaggtactaccaaaaaaaaagaggtttcttgtggtgtgtgatcgatggtgaggaaagttggcatattttgtatgagctcatccatccaaagttccaaaccaaaaggccaaaccttatattgactgtttaaacataaattcatgacaaacctagattcactgtctgaacataaactcatgacaaacttaatttgaccttatattgactaatacaaattcatgacaagcttgtacaactactgcttagtgcttactctactcatatatgatgtaatcatttactctagctactatgcagtagtggtggtctctagccaaccccctagcagtagtacactagatggtgtgatcctgcccaaagcaatactacaagggtgctaattttccaagaaaataaccttaaaatggggtttcaaaaagaaaataaccttaaaaccaatcacagcgccatactaggaccctatatcaaggtgatcagtggggcccaccagagtggaacaaaagaacaaaaaagagcaccagaaaagattatttttttatttgtaaggatgcattaggaaaggcaaaggagagataattaagataaggggcattttggggaaagatatatgcatgagtgagaaaggaaagctgctgggttagttcactgtaaccatctggactggacacatgagagagaagagagaagagagagagaccactggggcagaagagaacagaacattacataccagcagcagcagcagcagcagtaggagaggaggaagaggaggagccactccttatcatgtgtcttcttgtgagcccagccaccagcttctccctcttcttctccatatccaccatccaaaaggttatatgcccaaaagatctcagaaaatctccatctccctttctctcctctcctccacacttaccataggcctacactacacacaacaaatgcagcagtaatcagtatgaatgaatacaagaagatatacacacacagagagactcaacaacaaagtgaactccagctttatggaagaggagtaatgctagtattgagacaaggagacagcatccagagggtcagcagtacaatggaagcaaaggcaataccaaaaggttaggataaaaaaagggggagttatgcagcttggtcctgtgtgatgaaatgcagaagaattagatgctagcaaagctgatgagggaaggggggaaaggtgatagaaaaagaagaattttttttctctggtggtgtttcttgactggaaaagattcatggatctttagccccccaagaatctcaaaaagaaaaaaaaagactgcatagagttgcaaatcattatccagatccaaccaaagacaccatctttctgaattcttcagggtaaaaatgaaataagattttggctcccattcgctgcagggaaaagatagagataagatcactctgcgcacatggtcgcatcgcaccttggaaaatgaattcagggtattctcccccacacaaaaggcttgtgaattttaacgtcaaatgctctgtccgtttcaagaaaaggaagtagtaataaactatttaattcatgctactaaactagtcatatgatttgatttgcagtgaactccacatttcatacccttttgtctcgaaatcgaaattatgccaagaagttaatcaaacaaacgatggagacgaagcatgtagcaaaaacataaaccaaaccgcgaaatcaaagccaaccgaaataagatagacagacagaacagcggtcaagcccatcctgaaatcgagacgcaaccacgacatcaaagaaaccgcaagaaacagggcagaattgcagggcagttgatgaagaagaagaagaagaagaagaagaagaagaagaagaagaacacaatccacaaccaaaaccagcagatgaatcccccttcccttcctccaatccatccatccatccatacaaacagaccactccgaagcactaacctccagtcatatgcctatgcaccgatccatctctccctccctctctccaagcttcttgatcagcagcaacagagagagataaagagaaagagaaagagaaagagaagatgcgagatggagatggagaagaaggcgaggaggcgagcgagcgagggagagaagggatgagtaaatgcgaggtggaatggaagagcagcaactgcaggagacgtcgcgctttttgttggccgctttggcgtgggcagaaacggaaaccttgcatctgcatgcgctgcgctgcggctgccactgcacttgcatctgcggctcactgccccacatgtactaccacttcctgtatagaccaaccaaacaccaatacagcaaaggtgaaaccaaggtggatggtggtggtgattggtgcagggtgatctgctcctgcttctatggcaatccctatctcccacttaaaaaatatccccaatctctctttctaactgggtatttagagcaaaatattgttattgtgggttatctattattctagttcttattgttgcctgactattagctctctttgagaggtttttttaataagtagctatagcttcttttaagtaaaggctggaatttatattccattattaaacaagctaaataatttttagaaaaaaccttaataaataattaaaaataaatggtctaatcagtaatgcaatagaacaaagttttagcttttattgcagtcaaggcctaattatctattatataaaaaaatactgaaattttggtatggttggttgcttgattttatctctgctgcatccacagttttaattaatctaaccttattttttaaaaaaaacttaatagatttattagtttattaaaacgagtggtctaagtaatacaatagaatacaattttatgataaaacacatattcttttaggaggtagagcattatagttcatttcggtcatctggtaaacaatatgaaaaggaaaacatggtaacatgtgtgtgattagctagctgtaattaaaagtgcaatcaaggcaaagttatggatgaatctaccacgtgtaaatatggagtcctctctgttggcatgtgattaattgtaccactctttgtacaatctgctctggtccatttacaatatcacatctgaacgtactgattccaattatacaccgcgatatactatatcttttgatttaatggaggagaacatgcaaatatgcaattcaaatggctcaagatgattttcttggaagagagtagaaatgagatcatgcatacacatgagttaggaactcatcccgcgcatacgcaaaacggacaactcattagtacatgattaattatgtattacaaaacagagtagttattttttttagaatagtactaatatgatttttaaaaataacttttctatagagtttttttgaaaaacacaaagtttagtaattaaaaaaaatgtacgcgtgaaaaacgacaaacataaggtggaaaatatggctgccgaacagagccaaaatcagttgcagtgtgcagaggtgtcagtgactcatggattagacagcatgccaccaaaacagagaaaaaaagagatagcaatacgattactatgctagtctcactggcacgtgggccatgcagctgacgcagcacagcaccgtgtctcaagggctgtccagagtttgtgtgggccacaaactaactacgcacagaaggttcaatgggcccatatttgcaatccgttctggcccaatacctgacagcccacagcaagcccaccagagagctgggcccacgcgtcagttacacgtagcgcgtgtcccctctcgtttgcctccgaatcgggtaaagccgccggtggacggaatcgacggcggagatcccatcccttccccttcgccttcacatattccttccccctccaatcccaacacagcagcagcaattctttacttaccgtctttgcaaccttatccacctcctaaccactcactgacatcttggacccacaccccagatctagccctccccgcgccgggtataaaacccgtcacgtttccccccatcctttaccaatgcccccgtcgcgagcgcgtccacgtcagcaaagtccctgcatgacccaccggtgacactgccaggtgggtccttcttcctcctgggcccacagtcagtgactacgcgtagcggacgggaagagaaaaggtaaattatttactcttacgattacgctaatttcctcgcgtcctttgcttgcttagattatccccaaaaaggaaattattaaactcaaaagactcttgtattttctctccccttggttttgaattcgctcgccgccgacgcgggtggcttccgtcgagaagcttctggaagcttccgggaccggggcgccgtcccccgcctcggcgttcgtgcgtgcggcggcgaggcggcccgtggctcggcgatcgatccgttgcttgcttgcttgctgcgggaggaaaggtattcccctctcgttaggattcgatttcccgtacacgttacgaatattagcttgtggttttagatgtggattaggcggctgctgctgccgtagtagtagcggagctgcgatttctgcgcttcggtggtgtttccgctgctgcaatcgccccgcgcgaggtggcgttcggttcaaagctgtgcgcatttggggagatttgcgagtcaaatgtagcgattccctgtgtgctccgttgatttatccgcctaggtaggcattagactcgtctgaattgcggggagcggttttggctgttcgtttgatttctacctgtgtgcttccattttattcgttttcaaacttccgaaactaatatatgttttcagcatgtttaggttatttggtttggtcttgtctgtactagtaatcatgtggattcctcctattgcttgtagtgcttgtagtaatcaaaagggttcctggaagttgctatgatgctaccatgattgaacactgcacttttaaatgcacaattgatcatgcagtaggaaaggagtgcttccatttattcatgtctgctgttctgcaattgctcctgtaaatttgatgctcatagtccatctttgttttcctaggccatttttgctcaaaaaaactgtataccccatgctctaacagatgtttctgtgaaatagggctcaagatggtcgtctcaatcattaccagagctttaatgtaagtagcagcggtagtttccttttaatttctggaaaggggcaatgattttggccacacctgttatgtgttttgctatcttttgattttgcagacttattcttggatatgcatacccagcctatgattgctacaagacagtggagctgaacagacctgaggttgagcagttgcggttctggtgtcagtactggtttgtattggacaccccctttactttagactatcattcttggatttaattctctacttgatcacatgctcagtgatgattttacaggattttactagcagttctaactgtttttgagagagttggggataattttgtatcatggtaatgtggccatctgttattgtggttttttttgtggttgcagtttggagggaactttcatgcttgctgatgatgattttgttatcatacaggttaccaatgtatagtgaagcaaagctggcatttatcgtgtatctatggtatcccaagacacaggtatgaatttcttatctctttttaatttcaaaatcgtatggcttttgtaatggagagcattttcagggcacttcctatgtgtatgagtcattcttcaagccgtacattggcaaacatgaagctgaaattgatcgcaatctacttgagttgaggactagagctggtgatatggcagttcattacttccagaagatcgcagactacagtcacacaaggttctatgaaatcttgcaatatattgcttcgcagtcagaggctcaaagatctcgtcctcaggtacttcagaaaactcttgaagttgcttgccagccataatctctcagttacttccatttgctggtggaagttagaagaataggtctgcagcatcgtctctctcttgggcagatcggaactagtaatcttcatgattcatgattgtatttaaaatttcagaatcaaatgcatgcagtaacatacgcattcagcaaatttgacatacctatgaggttatgacctattggttctatattcctttcagccctgcatttttcacatcccatgtctaccattaggtatttaggttcatatttgtgttgctgttgatgagatgcacaatcattttcataagtaagacttagcttaatcgtggtataaatgtactaccaagcctttctatggaaaggtctgacatatgcatttcagtgcattttttcttcttagtgcttgaagaatttgggttactatatgatatatgaatttgattctgatcctgtgggatatttactgaactaacaatgaaaatccaacttaaaaataatatcgcgaggttccagaaagatagttaacctaatgccatttcagtggattattcactatttctctatcagtggtaccttttttgagaacttatgtgcagctgtttgaaaggctgtgtttgactgcttgttgttgagaagttcacgccaactgaatgtatatgtccggctacgtgatcaccatctagcgacttacatttttcttgtttgtttcatcaatgggtctgttagggggaaccaatagttttaaacacagtagcttattttttaaaatctaaattaagcattgttcttagatgtattagtaatatctgttgttagctggtgtcctttatttctctggattatttctgagcttaggagcttgagctaatttgaccatgctgaatcaatttcttaatatggtagttttactagttcttgttgtaaggtgctggaaagtttctaaaattgcttcagcaagagaagcacaaccaagtggatccgattcatttaggtcgtgtgttattgtggttatcttttgccaagctcccttagcagtgactcctaactagggaagttattttgcgccctaattccatctgtgtttcaaacatgaccctttattttattatcttaacttggttaatcatggtgctgattttaccctccaaataacctgggtccacgaaccaattgttttttgggtctctaggaataggatgtggaaccttgctgatgtcgaaatggacctattatatgtttattaggagtaaatgtataggcgcttcatagttctgaagttgctattttttgtgttccaacctttcttgtcttgttattttaccatatttataatttttttgactgtttcatataaactattcattttgttacatggaaattaccgtgtatagtttggcaatgcaaatatttgtggtcattttctggcagggttcaagttgaacatctccaatttatttttgcttctagcaaagttttttttttttttgcagggatgcttctagcaaagtttgtttcatgcacattttttctcatgttaaattattactaccaccatcacactcattatgatgttacactactcgtcatagtactaatgtatgttcagtttactgacaaagtaggctatctgggcacagtttactgacaaagttggttaaattaaaactaccaccatcacactcattttcagtttactaatgtatgtctagtaaagttgttgacatgatgcatgattgagttgttatctgagcacttagaggtgtaatatccgcttcatgtttctcagttgtatgttcagatgattgtttttgaactagatatttattactaccttcatattttaatgtatgacgccgttgactttttatcaaacgtttgaccattcgtcttattcaaaaaatttatgtaattattatttattttattgtgatttgattcatcattaaatgttctttaagcatgacataaatattttcatatttgcacaaaatttttaaataaaacaaatggtcaaacgttggtcgaaaagtcaacggcgtcatacgttacgatacggagggagtatttattatcgcgtgatgcctgcatcagcttatatctgtgtagagctacgacctgactctcaacgtctctgtttctgcaggcacagcaacaccagcagcgtccaccacctccacggactcggcaggtgaaccctgcaccgccgcctgttccttcaccgtcagcgcctccgctgccgccacagcctccgccgccaaggaaccaagctcaagctgacaaggccccaattccggtcgcccctccaggcgccgccgtgcctcctgcacagccacagccacagccacctcaagcaggcgctgaagccgtcacaacggagagcaccgaggcgacgcaggcggccaatccaccggcgacgacggcgagcaacccgcatcaagcgccggtaatacccgacgaggagacgctcatccaggaggcgatccggatgacacggagccggctcaggaggcgcatgggtggagcttgaactggaccgccgccgatgtacgtaaagctcccacgccacgggatcatttctcgtcatacgtttcgctctcgacgcagggtgcacactgcactgcatgcacatcctgaaatctgaatcctgtgtaaaaaaaaaaaaacaatctgaagcctgttggtttcgtttcgcggtttcgcaattgtgtatagatcccaccaggtcaccaggaagtagaacagtagattgatggacattgtgatggcacgagaagatcagtaaccgagtacattggtaaagaaagaaagatacttggttggtagatgatatgtgaatgtgagcaacttaggacaattgtccctcatctccttgccctgtgacaattgtcctttcctccttgccgacgataagatacaagctgattcttttcttttctatcactctcaagatactcttcggcctgaaaaaattgaggatatattgccaaagctgaagtcacatctttgtcacacacgagaatctcatggtaatgcaagaacttcattgtctgctaaggaaatcaaagtttgcacttagtttcatccctgccaatatgataccttcatatatttcctcataaagtataaggccctgtttagtttgcgaaaagaatttttttttggatgtcacattggacgaccggatgtcggaagcggttttcggacacgaatgaaaaaactaatttcataactcgtctggaaaccgtgaggtaaatttttttagcctaattaaaccgtcattagcacatatgagttactgtagcacttatagctaattatggactaattcgtctcgtgactttcatgtaaactgtgcaattagtttttctttttatttatatttaatgctctatgtatgtatccaaagatttgatgtgatgtttttggggaaaaaaattgggtactaaaccaggcctaaatcactccatatctaaacttccgaggccatctttcagcagacctagataaaagaaaacaacaacaacaaacgaacgaaacttcgacctcgttttatatttcgtttgtgaacttgtgatggcaccccaaaaaagggggaaaaaatgtcaggcaagaagccaacgaaacttcgacctcgttttatatttcagaactaacttcgacctcgttgatagacgatgcttcctatgtgaagatcagctacaggtttacttttgtcattctcgaaagtccctatctgtgtcgctctagttgaaatttcgccaaagcactgagaccaggagccaacctggatcaggtcccagctagctgttgatggcaacctggttggctgcttcctacaaccttatgttccattccgttgtgccagatatttagacatatacagtacttcatccgtttcacaatgtaagtcattatagcatttccctcatttatattaatattaatgaatctagatgtctagatttattaatatcaatatgaatgtgagaaatgttagaatgacttacattgtgaaacggagagagtatcatttgttagaaataataccattaattgttctaaagtaagcgtaattctagaatgtatgcattcaaaccttgattccttaaatcattaataatatatttgttatgaaaaaaacttccttctgattatattttaaataaattttataaatatataaaaacaataatgagacatgtgcattgtgtggatgttcgaaatgacaaagaaaataacgaagccattatagtcgtcaagcttattttccccacataactaaaacgtggttgcaaatgtgggttccatattatcacgtatactcacgtgatcatgtcacatcttgatggggaaaaaaaatcaggagccgcaccgactcaaaggttgcttaggcttcgttcgattgctctggagggggagtctaaaattaattaaatattaattattacaaatttaagaactgaatttatttgtttttaaacaacttctatatataaatatttttttaaaaaattaaatacaccatttatcagtttgaaaaacatgctaatgaaaacgagatagttgaagtttggagttgaagaatataacatggccttagtaggaacttattgttcctttctccgatgatcttcgacctgaagatgggccaggaatgtagtcaaaattgtacatattacccctttccgtattctcgttttataaataggccctctagaaaatttattttaaaatagacccttaactcaacggcattagcaatggaccgaagtatgacacatcggtgttacaaattttgtcgttgagaattgagatcctcgctaagctagcacaaactctatgtcgaattgtcaacaggtggttgccgccaaaaacattggcgcaaacattatacataatttgagaaattagcttacatttagccagaaaccaacgagtgaatggtaatttagtaatctgttgattacgtttacataatatttacatcattacttaagggcatatttgttggttaatctatcagtttacgtcaagctcaggccagctcagtaaggttcttgtattttgatgtcaaggttgatgctgggtttatttttagaacaaatttttagtcggtctatttgtagaacaagaacataagtaggactaagatgtaaaaattccggggtctcgtgaatctgtgatagtgataaatctgtcctaaattgtaatgaggacaagagttcataaatctaaaataggtagtacagcgacaactccccctgcagtgtgaaaaacaacaggtttatggttctatacgtactattaataaacgtgtatgcgcgtgtgaaattgggcataaatacattttgttccagaggaatttggttcagatataaaaggtacacgcatggtgaacctcacgaaatggaacactgttgactgaccagtatgtacagtgcgctccatgtttaacatgcacatgaccatcttgaccaaaactagccctagatactacaaacccatgattgatcttaattaacggcaattatattctctgccctgtttttaccattaacgcttaaacgaaatgttgcgaactgcaagtcgtcctggagcatctccaagctagacatctcttaaaccttgctctccatttacggtcccatctttttacttaatcacggaataagctaaacgatatatttgcaaacgaaaaataatttatgaataaatatatatatgtatatgtatgttcttagtgatttaaaagtataggctaaaaaataaacttcaatgaaaaactctaaaaccaactctaaatttaaagttaaaatttcaaattttggctaatgagtattagcatatcatcttttacccatttgataagctagctagtcaaagattcatctctatatttttcatgtgctctaacatgcaatatcctctccaaactacactcttcattttttttgtgggatccacatttcagtctatatctcatttttccttctcttcagcacaaatgagtgatttgaccagctattattctggcttgctagatttggccagcaaaggagtgattttactagcgggatggctcggtcaaccaaatatagcaagtctcttggtttgtttttttctcggggtttgcctaattttgacgtgacgagagatccacctttcttggagatgctcaaatttttagttgggtgccaatttttttaagtatatggacacacatttaaagtattaaacgtaaactaataacaaaacaaattacagattccgcctgtaaactgcgagacgaatttattaagcctaattaatccgtcattagcaaatgtttactgtagcaccacattatcaaatcatagcgtaattaggctcaaaagattcgtctcgtaatttacatgcaaaatgtgcaattgattttttttcgtacacatttaatactccatgcatgtatccaaacatttaatgtgacggaaaagttggaagtttgatgaaaaaattttgaatctaaacacggccatagtaatgcagctttcgatatttagactgttcggagctctttgttcccaactcctcttttcgttttacgcgcgcacgtttttcaaactgctaaacggtgtgtttttttataaaaagtttctatacgaaagttgcttaaaaaaatcatattgattcatttttttaaaaaaatagtaaaaacttaattaatcatacgctaatggatcgctctgttttatttgcacacaacttgggggttaggaatacgggtttccaaagtccaaacgcagccggctggttgacgaagatgacaatgtgaacgcagtggagtagtgcgtggtggagggacaggagggtgcaacattgtgacatatgcatgcatattcagtagtagtaaggtggcgtatttggatttcccgtcaatcggatctttggatactaatctgagagctactaattgtaacatagagtacttacaaaactaattgcaaaaaataagagctaattcatgagacaaatttttttaacctaattaattcataattaacacatgtttactgtagcatcacatatgctaatatagattaattaagctcaatagatccatctcacgaattagtccaatgttatgtaataggttttgtcattagtctacgtttaatgcttctaattagtgtcacaacatccgatgtggcagggattaaaatttaatccctggatccaaacagagtctaaatctccatcatctagtatatgtttaggttggacattgactgaatagcagaggttatcgttgactctgctctggttcaattaaacaaactaatgttgtatttaggggggaaattatgccaaaattttaaaattataacaagaactcttgtatttgatttagttaatgaaattaaataagtttataatattataataatagtactttttattcaattctatgcatagtatttgttttgttttgttttcaaaataagtgtttgagaaataattgatgatcggagttttaaaacataaaatattattttttttaccggaaaaagtactatacaaaaccaacactgccagccatgtgtgtcatagcaacaggcctaacagaagaccgatggatgggtcagcggatgcagcaacaaatcggcaaaaaatggttccttatctccaggggtatcccttcgatttcgctaattacaacgggaaattccaaaagaaaaactgaaatgatagtagaaatcacgtggtttactgatcattggacagtgggtgatggcactggcctttgttcattccatcgaaggtgacagtgaccggccagcacctgtactgcgagcattttcacgtgttcatgtacccttttattcataaaaataaacattctaagtacttcaaatttattacaaatactaaaatatcatagtactattcgtcttataaattacttcttatttaaatttcgtttatcctactgtcgaaacaagaattcgacaataataaaatagggtagcgcacgagacctaaaagtgaatggatgcggagacaaggatttagacaggttcaggctctctcgatgagatgtaataccctactcctgtttggggatttgaatccgtcgggtgtattatagatctgacgatctagttgtgaattataccccctagagggcctcctgcccaccttatataggatggggggcaggattacaagatagaaaccttaaccaatacgatatcagtttcctaaatctactttacaatattatcaaatcaggactttaggccgttccataatatacaaggaaacgtaatacccaagtcatgatccgttacatatttcataaatataagttatcccctataaccagtcggataaccataccgtgtgtgtatgaggtacccataatctccacacctacatcaacctgtcctcccatcccctatacatttctcattaaatgaggagcgtcaaagttctatcttcttgatcttaatatctacttaaataagctagaaatgcttatatttgtggatgaaagaggatatatcatattatggggatgtttggttattaatgagattggttgacaatatgatattgaatcttatcgaggtaaggtagaagaagacatgaactgattttatgttttattgatttactacgcgatgactttattgaaaaagatcatgctcacaatatcttttttcacttaggactagatatccatattatcaccattagtattataggagtgtttggttcatagccacattttaccaaatgtttagcaaagttcaatcaatctggtctaacgtttagttttttatatcgcttttgtggcatgctacaaaatccttcctaaagtttgtgtaattcaataaggatttcctagccacacaaattatggtaaagcagcacctcagttcaaaacgtttagcaaattgaaacatgcagccaaacaacccaacccaataagacaatgacgccgcacaacgtacagttcatatgggaaagccattttaccaaatagtgatatttttataatgaaaatttgactatcaaaatatgacgtcatacaagtatcataattacttaacacttcacatatataagtttctcaatatgtagattgagttttgagttagaattttcttttggaatgatatgacacaggagagatactcaatattcatcaaaatatttaaatattttttataattaatttgttcgggagtttataactaattaaaccacctgatcagcacagtcagcaactcagcattattcaagcgcttgtggatcccacacacacttcccatcttcgatcttcctataaatgaagtggccatgcattccactttttccatcccatctaaactcgcttgagcttgatatgccacagatcaaggcttagaagagatagctaattactctacgctaattaatccagcagcttagcttagcatagcttatctatggtttgccacgtcttctcgtccttctcctcctccctaattcgtgtgctggaggcgccgctgctccttccagctgcttcggcttcttcttcttcttcttcttctccggcgagccggagcggtggccgccgccgccgtgcagcccacgtccgcccttcgccggcgatctatcccggccgccaagaacttgcctctcactcatccatgctacccaccgacttcgacatcaaggtaagctacgtaccctaattaaacaattatttaggtagctactttctctattttgtactattatagtcattttgttttttccaatcagaatgtcaaatatgtttttatgctactcccttcgtagcaagagttagaaatattttatatttaagttcttttgcaaataagttgttactatttgtaagtctctatatatgcaagactttaatagataagtaaattaaatgtttgatcagagatcatccgatgagtcatcttaatactcattgcatttgttgcatacgtgtgcatgcaattcttgatctttgctatatgtagaataagttaatttttctttgatcatggtgccaaaagtaatatgtataatttttatgaaagaagggagctagtatgtttgttttatattaaaaatgttattaaaagtttaacttacataaaagtcaaaacgaacatgttatcaaatagtgaaaattaggtagctaataatgaacaccatgcatgatactactaatcaatatatttgattaattgctaatctagctcgtgtttaattgatctgcaggtgttgattgagcggcacgaagccctgacggacgacgtgcaggagatgctgcagcatcaacgccggcgacaccagaagacggcgagcggcggccgggagcggatagccaccgtcgaccacctcaggcgcctctgcatggaccactacttccaagacgaggtcgacgacgccatggacgcctgcctgctcgaggagctcgcccatggcggcgacctgcttgacgccaccctcgccttccgcctcatgagagaagctggccaccatgtctcagcaggtgagatgatcactctttatgtgcgaacgcgcgaaagggttgcacgtcaatactttagaagaaaaaaattatagttacacaacgcaatcagctagatcggcttataccaggagaagggagaaaaagcaaaataaaaagctgaagcttaaaaaactacagcggctaaatacaaaactccaagcagttgagaggggccgagccacgctacactcccaacaaatcccaaaaacggcaacaccagctaaagaacacagatggccctccgagggtgtgagatgatcacacactaatgatcatatatcatatgttacagattaatcaatcaactaaccatgattaattgtcaattgcagatgaggttcttggaagattcacagatgataatggcgaattcaggctcgattacagaaaggacatcagagggttactcagcctgcaagacatatcacacatgaacattggacaagaagcctcactctgcaaggcaaaggagttctcaaccaggaaccttgaatctgccatcaactacctcgagccaaatcttgcaagatatgtgaggcagtcgctggatcatccctaccatgtcagcctgaatcagtacaaggccaggcaccatctcagctacctccagaccttgcctatccggtgcactgccatggaggagctcgcacttgcagacttccagctcaacaagctactccatcagatggagatgcaggagatcaaaaggtacatattacagtacatacattattgaatcattgatatacatactagctagctagctactccccccgtcccaaaatataagaacataggattagatgtgatattttccaatactatgaatatggacaaacatcatgtccagatttgtagtgctataaaatatctcatctagtacttgttataatttaatttttgttgtaacaaaacaacaatgattcttacttagttgaaacacacttgtatcgaacaatagtacgattcatagaatcatagaaacttactatctccgttctagaatgtaaaaggctttagtgtttaacacggtaatcaagaaagtaggtagaattaggtggtgtttgaatctcctgaagacgaagatgaagataaagattaagtgtttcatacaaacttgaaagatggattgatctgattttttagaacaactttcatataaaaagttttcgtatgaaacgcaccgtttagtagtatgaaaagcgtgccaatttatccaaaagtttatctacttttttagtggattcgaaagggaccttaaatggagagatgttgtgattagggttgtgaacctataattggttggaaaaagaatatcaatggagaaattataatatgttgggataaattcttagttgtagaaaggaaggaatacatgcatagtcatagctacttgctatagtttaatttcctgtattaattgaacaaccgtgtttcttcttaattagttagttgaaacacacttgtatcaaacaactgtaagaatattcataagtaggagtagtaccttgctcttccatgcatagctacttgctgtaattaatttcctgtattaattgaacaaccgtgtttcttcttaattagttgaaacgtgcacgcttgtatatatcaaacaactgtaagattcatagtaccttactcctagctacttgctgagtaatttcctgtattgactgaacaacagtgtttcttcttaattactttattcattttataatataaaagattttagatagatgtaacatatactagtacaataatgaatctaaacagtctgacacatcctagtaccagattcattgtactaatatgtgtcccatccacctaaaatcttttatattataggacggagagagtatcaaacaacaatgtgattcgtagtaacttacatgcatgccaactacttgctgtattaattgaaacaacagtgattcttcctaattagttgagcagttgtatcaaacagcagtggttcatagttaatttgctggattaaactttgactatgagtgtctgaaaatgataatatgaactatgcatgcagatggtggatggacctgggattggctcaagaaataccagttgccagggaccaggttcagaaatggtttgtgtggatgatgacagccatccagggtgcctccttgtcaagatgcagaattgaactcacaaagatcgtctcctttgtctatattgtggatgatatttttgatctggttggcacacgtgaggagctctcctgcttcactcaggcaatcagaatgtaagtctcagcttaagatagataattaacatgagtcttcaacatacatttgattttccctattctcttttttcttattcactggattatttgctctacacatagagatatgatttttcaaaaacttcttgtctagctattttatttcttagactacttattactaatataagccatttgttacatttataatatttaatatttaatttgtccctataatcaagtagatatataccatcaactttcattcgcgaataatctatttagaacagagccttaatttaaattgttattatgattataagtaacaattaataatgatttttttacaggtgggaccttgcagctgctgattccttacctagctgcatgagatcatgcttcagggctctacacacagttacaaatgacatcgcagatatggtcgagagagaacatggagtaaaccctatcaatcatctgaagaaagctgtaagtaatttttcgtttgtgttagaacatttttttaaaaaaatctcattcacaacgaatttgcagcaggactgaccatgcatatgcaatgcaattgactgaactttctttctaccatgtgtatcttgtgcagtgggcaatgctgtttgatggattcatgacagagacaaaatggttgtctgctggccaggttcctgactcagaggaatacctaagaaatggagttgtcacctcaggagtgccacttgtatttgtacacctgctgttcatgctagggcatgatgtgagccaaaatgcagcagagtttgttgatcacatccctcctgtcatctcctgcccagcaaaaatcttgagactctgggatgacctgggcagtgccaaggtcaatacctttttctcaccatgtcaaacatgctactcccggcccttcaatttctttaatatagataatgtcgttgtcttctgtacatacatcgtctggctactgtatttggtttatactttaagtatgacttacattttttttcatatttacataattttatttctaataatatgaatagttaaacacatgttaaaaatcaacgatgtcatatttattaaaaaccgggggaagtaattactacacacttatacgtagcaaattaatcttattcttctttgaaatcttattctcatgttttaaatcagcgcccacacacacatcaaagcaatatggtatctctgatatcttctctaaggattgtaaaaatataattattttaaaaaaatgtttaaagttgtatgggagattgatctttgctgggcctatcgtgaactgaaaatgtatgaaataaaaattgtaggatgaggcacaagaaggattggacggatcgtacaaggagctatacctcaaggagaacccggggctcgccgctggcgaggcggaggagcacgtgcggcggctgatcgcgggcgagtgggaggagctcaaccgggagtgcttctccgctagccccagtagatcgtcgccggcgacgaccttccccgccggcttcacgcaggcggcgctcaacgccgccaggatggtcggcgtcatgtatggctacgacggcgagcggcggctccccgtcctcgacgactacgtcaggatgctgctcttctgaattcgatcgattgattcgacctgaattttaatttcatccatgtatgaacctcatcatcgtccatgcataatggcgtgtagagattaattgtggattaggtctttgtaaataggattatagttagttgagtgagggagatagtactggtcgattttgtagtaaataaatatgatgaatttttactccctccattatacatattataaggtgttttagtttttttttcctatgataaactaatttcaaattgaatgaatttgggcatgtaatttattgccaaagtttcattttggattactctttaacttatgtttttattttggaccatataattctacattaatttgttgcactttagaccacttcaaaccactttctgtaaccatatatcaactctagcactgtaataaactccctcaccatgctcaagccacaattgataattttgttggcagagtggcgtacatggctagagaaagccttaggatgataaaaaaaacaacaaatgtaaatttacctagtacaaaaatgaaatgattagtcaaagggtggttcagagaaaagacttaacaataaaatgtggtaaaaaagtgccattcactctctttaattttcacagaaaatatagcaatattttttacacaaaacaaatatatatttaatggtgaaatgtagatggtgctatgttttttcataactttgatcgaacttgaaaaaagtttgaagttaaaacaaaccttttcatgccctgcagcatggaacatagagacgcgcaatttttttttctaaaaattatgggcgtgtatttggacaatggatacgaataaaaatcatcaagagccttttgcattcatacgagcgcataataaacttggagtcgaaatactaaaaaatgtgaaaattgaaaacaaaaacatcaatatgaggatgacaagtggggcccaccgggggagggggtcctacatgtcatactggtcacgggccgtgctgccaagctgtcaatcccaaattcacctctcgccgtcacgcgaattccggcggcgacccacctgcccggcggccggctacccccgccacgcaccaccgccggatcaagcctccctgccacaaaccaggagctcttcctcgccggcgctctcctcatccacccgtagcaggtgaccatctctccttcgcgcgctctcctttgcaagggcaaggaagccctaccttgcttggatgacttgaatccaaaccggatctcgcttgtgccgatgtgttttggtttcaatcctctactggtattcgcagctatatttccattcccccaccccgcgtttagtccccatcgcgtctagtatgacgatttttttttttaccatagattgggggtttggaagtagattgtatgttggattccactctgttggattgaaatactctaatcattgtttgcagaacccagattggtgaagtttccctggtgtggaaattttttcattgtgctcttcaatgttgtttgtactatcataaacatcaaaagtagttcagattctctgctgcataattcacactaaatgtcccatcacgaaaatatcctctgcgttgttagtgatacactgataatctgatatacatgtgaataggtatggtatagttatctgcggtagaatactatggaacccatgcctaggcttatttttgtgtatgatttggattttagagaggccctggaaatgtgtgaagtggttagaaattttaggtgtaactgtaattcacaggctaatgttctatgtatgtgtcataatcggcttctgaatcttttcaacactgaatggcaatataaaggtggtgtaattttgactcaccaatcgtgaatcatcatggatttgtgaaccatagcattttttgtcatcttttctgcattccagcctgtgactaacattgtatcttacatggaatttcctggaatgcattactcaatctatgatctgcaaaatgaagcccaacagtttcagttgattttgatatttccaagatgcatttctgttaatatttttttatgatactcagttgacaaaagataatcaatcatattcttttttttgttcaaatttctgtcgatgctgatgtatgattgctttgttattttctgtgtaggaatggagaagtatcacagcaactcccgatttgctcccttcagagatgctccatttgctctccgtggtaagagattttcagtgatttggtatgctatctgtccttctgacgtagttacatgatatcaaacaattacaccacagacacactgaattggtaatattggagacatgcatacatctttttaagtatattcttgtatgtaggaggtaaaactgactgacagttgaggtatcccaaggctggaaactacattagagtgtcagtctgccaaatagtggttcagttgagacaagtctaatactgtgctgatttatcaccatatatagattgtctgcatagctcgagatgatcaaacacagccgtgtagcgctggtcatttattatctgaatgcaaaaggctgttgctggtcatacatgatttatcttttatggggacaagagtttatgcgtgtctgacatgactttgatcacttccggttggatataggtgaataattgatgtgtagttttagtgagaaacagccatctctagtgaatctttagcaagcaactgctaattctgtgtatacatgtatagttcacaatgccttcaatcagatttggtaaaatgcaatcaagaaccccccccccccccaaaagttttttgtgtgctcttgctctatgtatgtttttttttttttttgtttacagttcatttcacacaaccaggaattcctcacatttgttgccaccatactttcaggtgcccttggtagctcaggctcatctttcagcagcatcgacagcctcagacgctcctcaacccttgagcaagctagggggtacacatctcgtcccctaggagctgtgcggccaaagatgctcccatctggatgccgacccctgcacacaagccatcctctgtcggctcctgttgctaaccgccccctgtcaccccaccttcctctgaagaagccacagctgagtgctacattctctatctcgcaccgtatatttggtgctgcgttgggtgctgccattatatccattcctctcgccaccaagttcagcctcatgtttgatgtctgagagagaaatgtggtctgcatgatgagaaagaaatgctatatttctgtgactatctcagcatctgaatttgccttgcaatgcaactgtagctgccgttggaataatatctttgctgtgcttgtagacttgtgaataataaacaaaacatgcaatgaccatactccctgtgagatatgatgttttatgctaagtgttaattttctctaccctttattgttctgctgccttgtggaattccatgattcatttttctcctggcaaaaaatgcttgccatgcgtgcaatttattcactatgagtttgcgttgtttgtataatgctccagttgagctgtagttcttttgctgctgcaaggaagggttggagacaattgaaatgcccaatgagcttatagtgctgaattcaatgtcaatgatcattgccaaaaataaaaataatatattttagtatgtgtaaataatccttgctgaaatctaacataactatttgcacttttttttgtatgtacatcatcattgctaaaatctttaataagtatttacactgttttttttttaaaaaaaagtgtttgtctctgttattagtagggggagcagggtggtagtacctggaaaataaaagttcggtgcaatgaatcgcgcggcgaggtcgaggtcgccggaggacgcgtcggtggcggcggcgcggaagctgcacctcctcctccgctcccgggacctccgcccggcgctctcctacctccgcaccctcccctcgccgctcaccctcctccccaaccacgccctcaacgccctcctccgcgcgctcgccgccgccggccgcgtccgcgccgccgccgccctcttccgccgcatcccttcccccacaccgcactccttcaactccctcctcgccgccctcctccgccgcggccgccgccgcgcggcctccgcgctcttcgccgcgctcctccgctccccctccgcctcccccgacgccgccaccctcaacaccctcctccacggcctttccaccgcatccccgcacccgtccactcccgcgctcctcaggctcttccgcttcttgcccgacacctacgccttcgcgccggacgccatctcgtacaactcgctgctctccgctctctgccgcgccggcgacgtgctcaccgcgcgcaagctgttcgacggaatgcgcgtcggaggagaagaaggcagaggagctgtctttcctaacgttatcacatacacgaccatgatcaaggcgtactgcgccaagaggctcgtgaacgaggctctcgcgatcttcaagctaatggttgcggatggtgtggcgccgaacaggatcacatacaacacgatggtgcaggggttctgcgatgccggcaggatggagctagtgaaggaggtgttggagatggactcgtttaggccggacacttgcacattcaacactctggtggccgtgcattgtagggaaggccggatcgaggatgctatgaaggtgtttaatcagatggtggagctccgtgtgagacgtgattctgcaagctatagcatggtcatccgggtgttgtgtgagaatggggaatttgggcaggctgaggagcttgtggatgagctcttggagaaggaggtgctcaagaagagagggggttgcacgccgctcattgcagcgtacaacccggtttttgtgtacttgtgtgagcatgggaagacaaagaaggcaaggatgctgtttgggcagctgctggaccggaggagcaaggtcgatgttcctgcattcaagacattgatccttgggcattgcagagagggtgatttcgaagaagggtatgcattgctgctctcaatgttgaagcgggatcttgtccctgatgatgaatgctacattgccgtgattgaagggttttcacagaggggaaggatgaagtttgcatgggaagccttgcacaggatgttgaatagcggtcttcggccaagcacaagtacttttcactcggttcttttggggcttttgaacaaagatggttgtgcaaaagaagcagctgatttgattgagataatgctagagaggaagattcgccaaaatgttgatctttcgacaaatttggtagatacattgttcaggaacaacctaaatgaccgtgcttacaagattgttacatctctatatgaccatggctattacatcaagatggaaaagttaatcgcaaacctttgcgaggaaaagaagttcatagaagctgcagattttactttgtttagcttggagaagtctcagaattttggtgtagccattccaagcatggttctggatggtctttgcatgactggtagagcttcagaagcattccggctgttctatgaactcattgagaacagaagtgctttggcttctgtcgctgcacctcgtagtttagttgcacttcatcatgcactggaggaatccgggaaaatgaaggaagctgattttattgctagacagatgagacgtgcaagtgccagaataagggaaagaatctagtgggttgctttgtcccaaggagcatttcaatcgcatgccctttgcttctccaaacaggatggactaataagtgtgaacttaaaagaacgaacaggatgcagaaactgtgcctgatccactgccccataagaaatggatcaaccaactgtatgatgttagaatgcagattaattcagcagatatccttttttttttcagggaaactatggcgggtggattagcaccggcctgaacatttattgataaataaagagatagttacaaataaagataatttacatggaggaaggagaagttgcttgagaattcagaaaatacagaggggggaggatggagtttaagaaattcctatgtcactaagattgttcatccaggtgttcagagcggggcgtagatgctccgggcagcggtgtacccataattcagcagatatccttaaaatattggtccaatcaggactttgtatagccaaacaatcaagccaactttctctgtcactatagtatcaccgatctggatcatttcttctcaaggattgatatctttgggaggaaatgaagtgtgggaagaccagatcacaagagtactctgctcctggactttgaagggcagtagttgcgggagaccaaagaatccggctgaaagaaacatattgtgaaaatgtactgctttccccccccccccccccccctaaatgcatgaggcagagctccttgccctttgtgctcaaaaaaaaaaaggaaaagaagaaaagtggggaatttaactatttgccacttttacatttgacaattaaccaaatacccttcttaagattgtacttaagaatttgccattagagagagaagcttttgtaactttttgccactttttgccctgtggagtgccacatgtgcatgccaacatggaccaacgtgaaaaatgaccaacctaccccttctagctagtggttagtttctcagttgctaagcctgtccgcattgaatcttagtcataattcattcactggaaagataccaagagaaaccagcaacctgcccaatcttcccattttacacttttaaatttataaggcaacaacatcaatggcaccattcatgttacagtcagttcattaactttttgaggctgcattcggatgtcttttttctaacttctactcacagttattaggactgaccagaccggcggttggactggaaaaaaccggaaccagggcctccgccggtctgagttctactccctcatttttttcgcacgtttctttaataactttttaaataaaattaagttactttaaaaatatatattaatctattctttatttattaaaactcaaactaaattagtcatgcgctaattctttgctcagttttacgtgaagagagaaatatttccaaaccatgctatcgcacaccttaattgagctcactccaggtggcaccatcccaacaataccagccaaattggaataccgtttagcagcttgaaaaacgtacacgtgaaaaacgagagagatgagttatgaaagtgaacaaaagaactcaatctaagtatcgttttgaaagtttgttataaccatctcagtggatctattacttcaaatattgatttgttaactgatgtggaggtactcggtctttaatatagtacctcataaaagtgaacagcatccataccgatgcaactgattcgcgaaagcaatttgtccaaatattattcctgactcagcttatattacagacattactaacaagggtagattagtcatttcgtgtgcctggtccatgctggcatgtatatgtggcactgaacagtgcagaaagtggcaaaaaattacaaaagcttctctctccagtggcaaattcttaagtgcaaatctaagaagggtatttggttaattgccaaacctaaaagtggcaaatagttaaatttcccaaaagtgtgaggcaatttctatatcaagcattattattttggaagacaggttggctaacttaccatcagtctgcctatttctttacagaggagtgaccttagctcgactagcaaatattcctaatactttacagaggagtttccttgccagttgccacaagatgtattggttgatgtgtctgaacgtaaagaatcatactacaaaattccaatttcacattgtcgttctcctgttttgatgctgtttgtgagttgtgatagccgtgactcagtttatgtgcatgcattcagatactttgggggctcaccacagaactacacagtatcctgccaactcagttggaaattgaaacactgaaatgtgagaagtaggagatgatcataagaacattatgttccttcacccagttatttagcacagaacacatttaatcctactcggcgcagagaatcaatggaaaacgcgtgatgttcagatctcacagttccaaggaaaccacgaacaggtatataacacgcaatcacatcaaacgttttaagtgttcaacacactcgaaatactgagtgaattccaaggttactaccataacaaacagttctggtatcacgtctctagtactacagagatattcaccaccacaggaaagctgggtaccgccacaggaaagctggattcagcatggtaggcagggagaaacacactatttcgtgaagcagtgtcactcaatagattgcaacactcaagtaatcccctatctgtgaaagaacatagcaaataatcaattgatttttgcctcagaagaatacattgtaataacataatacagctctgacaaatacctggaatcctagctctgcaagagttttagcatcatctccccttccatggccataagagaaggttgaacccaccttcaatcaatatccaattatataagttatcacaaattgaacagttactggtttggaatataaaggaacatgggttgtacaagggaatttactgacatatttagtggtttaatggcacagatagaacttgtaacaagctacgttttagtacagagacaattatcacgatgtgactgaagtggctactggtaagtggtaactacatggggcctagtggtgtaccaatgacatgtgttaggtatgcatacctgagtttgcagaaaagagattttgatgtcattggaagcatgtcatgaatataagcacacaaaatagtaaccataactaaaactaatagcccatgtatagtgaccaaactaatagccaacgtatagtgacagtcaaagcaaaatccaactcattcacgataataacactcattccctattcagattaagaccaacgtgctctgcattttttccatgtttgtgtatcagaggaagaaaaacaggatgagcagaagaatagtcacaatggtcaatggggataaactctcacctctttgacaacgaaacgaccatgcttatcagggtacacgaaagcaaaagaaagccttgcatttctttttcttgctgcaagagcaacctctttcacctgaaacataaccaaaactgtgctgatcagatctccatctaaaaacaacatttagtcaaacgtagtgccaaaccccacttatcatcatcagactagtcaaattttgttgatttctagtttgttaagtagtataaaactaggtaaaatttcattttccccaaagaggacaagaaagcacaatattagaaaaattacaagatcagtgagctctcggagtgtggcatccttccacgtgtatatctgcacttcatctttcggctcctttcctctcacggcaaactcttcattttggtgatggccaccaacctgaaaataaatgaccagtaccacaatcagctttctgtgtcgctgagtgtttactcaagaatctgaagtctgtcctaaatgaatggcttgggatttaattttcaacaacactaccatgagttacttgatcgagttatactgcatagaagtgtgactcaactacaagtgcgatatgaacattacaattccatcaaggcaccagaacctatgattcggtaagattgcacaatgcaaataactagcgcaataaagtttctgactatttatttaacttgtattcaaatgaacatatgctctcctcagtcaaccacactaaacagaagtgtaaatcacataatgtgaacttatcatacatacaggaatacaaatgaacgaagttagcagtaagagagataacaagaggttttacctttgtgaaaacccggagcaggagagggcacgtctgcaaaagaacccgatagtgaacagtaagtaaacaaatcaatcaacatggttaacctagcagaatcgaactggaacacaatgccgtcgaatcgcaaggtagtacgcaatctactgctgttccagcgcatcgattgggaggggggcacggaggaggcctcaccttctcgcgatcgacgggttcgacgcgcgcgcgagccatgggaggaggcccccggtactgcatcggcggccctggccgcacaggcctcatcggcatctcgccccttcccgccatcgcaacgagacctccccctgccctgcccgaggaagaagaaagctagtacgaatcaatctactgctccggaatcaccaatcagcaagcgactgaccttgctcacctgctccgccgccgccgccgccgatcacttcagaaggggatgcgagagaagcaaagaaaaccctagtaaactttttgtagattgcaccctgggttcaaatgaaaatacaattttacaattcagtccacctctaaaaaagggacatttaactccatgccacttttaagatgtagcaattaattattagttattcattgtctatgatacgtgggtctaatggcaaataatttagcaccactagtaagagagtaagggcccgtttagttctcaaaaagtttttcccaaaaacatcacatcgaatctttgcacacatgcatggagtattaaatataaataaaaagaaaaactaattgcacagttatgggagaaatagggagacgaatcttttgagcctaattagtccgtgattagccataagtgctacggtaacccacatgtgctaatgacggcttaattagactcaaaagattcgtctcacggtttcccggcgagttctgaaattagttatttcattcgtgtccgaaaaccccttccgacatccggtcaaacgtccgatgtgacacccaaaaattttcttttccccaactaaacacaccctaacaaaatagttaactattactacctccttccctaaatgtttgatgccattgacttcttttaaacatgtttgaccgtttgtcttattcaaaacttttgtaaaatatgtaaaactatatgtatacataaaaatatatttaacaatgaatgtaggaaaagaattaataattgcttaaatttttttaataaaataaacggtcaaccatgtttaaaaaagtcaacgggttaaacatttagagatggatggagtaccttaaaaaaaagcgttgacttgttgaccacttcgttgaaaaagccaaaaaggaatccgccttcttctccactccacttcactcacgccttcctcgccccgcgtcgcgaaccaccgcgcgccatggtcggcggcgagcccttgcggcggcggcggcatctcgccgacgatggattcttccggttcctcctcccctcgccgaagccggccaccaccaccaccaccacccctcctcccgccgcgctgttcgtcccgccccaccgcctcatcgcgccacccgtgccgctcccccagccaccccgccccgaggagcgcctcttcatcgtgccccccacgcgcccttcctggctcccgcctctctcgatacctccgccggcgacggcgacggccccgccgccgactcgttgccctccgcggcggatgggcaatggtggtggtggttgctttggcggccggagtggggtggtggggtggaggtatggaggtttcgtcgggaatggtggacgtcgtggcttcgagcggcggagggtgggaggaggcttcatcggagcagcgaatgcaggcgaggccaccggcggcgagaggcgggcggtggtgcgtaagagggagaagaaggtgtgggtcgccgtggagaagaagggcgaggactgcggcggcggggatgaggaccaggcggcgatgggcgcgggctatgccggtggagatgagagggacgagcaggtggacgtcgacgacgacgaacaagacgacggcgacggcgatgaccctttcgacgtcgccgccgatcacgacctcctcgccgtcgtcgccgatggcgccggcagcgagaaaccaatggaggtagaggaaaactcgaccgagacttcaccgacgcttcatgctatgaaactcttcaccttgctctccctttcagcagctcggatcgccgccggatcaaccgccgccgccgccgccgcgccagcgagtcggaacgcggcggtggagggtggaacgccgccatgacatcgacgccttcacgcccggattgctctccctctacgaatccctcaatccatcagaggagcacaaggccaagcagaggcagctcatcgaatccctcacgaattctgtgagcaaagagtggcccaacgcccagctgcatctctatggatcgtgtgctaattccttcggaaattcgcatagcgatgtagatgtttgtctccaaattgacactgctgcagaagagaacattgctgagcttcttctcgcattagcagagacattgcgcaaggatgatttcgacaatgttgaggtaattaattaattcttctccagatatatgcaattttgcaagcaagcatctcttccaaatttgaatgattcatcattacttgaaaaatttaatattagctgcataattaatctggaactggaatgtgaagagctagttgcctcatgtaattcttcataaatgccccggtggaaaaaaaattaggcccgggaaaaaataattcttcataattgatgtatttgaaaaatagcttcttaattgacgcaggttgagactgttcatcttctaatgcctgtcaaattcatgcaggctattaccagtgctcgagttccaattgtgaagattgcagatccaggaagtggcttgtcatgtgatatctgtgtcaacaatctctttgctgttgctaacacaaagcttctcaaggattatgcccagatagatgagaggttgcttcagctggccttcattgtaaagcactgggccaaactaaggggcgttaatgaaacatatcgtggaaccctttcgagctatgcgtgagttaaacgactttgcgttcatgattttcccctttttacagctatatgttatttgttgaaaatcttgaacctgatcttgttcttattaatttgcagatatgtgcttatgtgcattagcttcttgcagcaaagagagcccaagattctaccatgtttgcaggttctataccttactttttatctcaccaatatgtttcattcatatgaactactcgctgaagtactgatactttggatgcacacagtttaggataaaatcacttcacgcttgcttcatctgcatttagactcatgatgctgatacaggttaaacgaatggtctgcacacatttttattttcattttcatttttttatctctaaaatacttaacttctatctcttttatttgctggtggaatcgtcctgatttcgcattctcccttcatatatgcatgattctgttttggatggctcgacattcaactatggttggtcaattttctttcctttcttttcttttttttttcactaatgtagcaggtccattttttattctctttgattgatgttactaagagttgcttgcgtctagaattgttcagatgaaatcaggatctgcaaagttgtatatttcagcttcatctatgaattacttccgtcagttttatcctgatgcaatttgtcctctcaactcactccaattgtaggcgatggagccaacatatactgtggttgtcgatggcactgaatgtgcatacttcgaccaagttgaccagcttaaagattttggtgctgaaaacaaggagagcatcgccgagttactgtgggcattcttccactactgggcattccatcacgattacaggaacgatgtcatctccgtccgcatggggaacacaatcaggtgagaattgccaacgagcgtttctcaaaaaccgactaaacttcaaaaattcgattttgaactaatgtcacatatgcttcaaagaatttcgcgtcctttttaacttggttcgatctctggtcgatcgatagcaagcaggagaagaactggacgactcgcgttggaaacgatcgccatctgatatgcatcgaggatcctttcgagaccagccatgacctcggtcgtgttgtcgacaggcagacaatcagggttctcagggaggagtttgagcgagctgccaccattctgcagtacgacgatgacccttgtgtggctctttttgagccctatgattatgaatcttgattattattattagcacataaattaataactagcctggaaaatccagaaaacagtagctatcctaattctaggtagtagtgaagatccagtagcatgcttaaaacacttggtgaacagaagaacaacagcaggttgcattcaagtatgtcaaatttgatagaaagttggatcttaaaatcaaaagtactatgccaacccaaatttttcggaatgcttcccaagacctgtgaggcgtttcacacattctaagaaagttggatcttagaattcctttgtttttacttacagggcaatcctgaagaccacaaagacaaaatagggctttacttttgaagtggtgcatgcataactgaagagtaaaacaatcttatgctacaaaaaccaaaacaatataaaattcatcaccacgcatttagatggaaaaatgtttgtgtaatatatgaagggggtggctggaaattaactgaggcccggaagaagaggagcgatttgctcccaatgagaggccgggaaacctagaccaggccaggccttttaaagcccacaaggcctctactttctcttccagagtagatgggcctcatttcgacccagcccaagatgaagcagagtctttctcttccctttcttttaagagcaaaagcagtgcatcttatcttaaatctaaaatttgccacaacatgctaagctaaattttacacacgccctagtttttttttttgcggttatttgattggtgccacagttttagctagccacattacttaaatgtaaaatttgatgatttgacactttatttcttgtcactttaatttttaaaattgatactttttaggatgacgtatgggaccatgtaagtcaatgaaaatgaatgttaagtaatcgaaagccagctgagtgaaatatcaaattatcacatctcttagaacacatggctccgcatgtcaaaaactcgatttcttgtatataagaatgcataaaggtatggccaaggtgagttgcactgaagctgtgaattagtgacccgaagaaacaacagctgcattatgtggcgtgcacctcaataatattcattttgtgacgcagagctagtataagatattgacatcttttcgcggagaaagatgtggaaatttttgttcttatctatttttgctttcttctgcgtatgctcaattaactgctctttgacagccttcgtgtttgacagtggaaaacatttccttaccgtagcaataatgttgcttgcaggtataattcctaggacaaaactatatactactacctccgtcccaaaatataacaatttttagctatgaatctggacacacagttgtctatatttatagttaaaaatgcttatattttgggacggagggagtatatcatgacaggagaacgaattctaccctacaacttactgatttttcctggtctaatcttctgggccatcatgtcttgaattccgttccaaagatcatactatgaactaagtgcagcttctgtatgagagctgaggtgccactgatcagcagagattgcagaatgatctttctgggcttatgcaactcttttcatctttgttgtcacctcaggaaaacctataattcatactacttcttatgtggccttcaccttgacatactcatcatgatggttattgaagttttcgttatatagcatgcccgttggagaaagaagccgttgtaaagcacttccaaaccgaccctggaaaatggaaacagtattaaaatgtggccaggaaacatttggagtagcgagacattattatatagtgagaagtaagataatgcaaaaaataaggctcgaaacgatagtctgttatctttggtagggaactaaggatacaaatatgagaaaaagaacttgatatattgaaatggtcagatggccttacccactgaaacaagacaagtatccaccagcatccaggcaaactaccaaatttgttgcgaatgatctgttaagaagaaacgagatcagagaagtcgatcattaggatgtgactattgttatttgaacaacaaagaagattaaaggattttcaaattttggacttaagttcttttagttgctagacagccatcacagagctttatgaactgagtgacagcattcaaaagtaggaagaagatacaatgttcacagtaccaatgcttttttttttctcaagctcattcaacataattgaagtagggacaaaaactccatctagcatcgatctaaagaacctatatctaacatcagtacctcaccaaaggagaaagaaaggaaacagtcatacggtcataccattagtagaaaggttccaatgccaaagcatgctcccattgattgactcaaaaacctgagatctcttccagcctgagaatagggagaaagtaccaagggatgtcatcacatttttccagcacgtgccatattcgactttgcattaatgtgctatttatctactccaataaaacgtaaaatatgatccccacttcccagtgttaaactgctagaaacctagtgccttgagccatgcttactagggaagtaatggcacttggaacaagtaaattcattttgacaaggttttcccagactccaaatgtactttccaggataattgctttaaaagtcagccaaaacaaatatatcagcttaccaataatgttccttcaagactatgcactgaaggtgtcaccaataatgcacagaaatatggaatcagcactttatgcatctgtcaacagggtaatggactgtcagtaagttctagacaaaatcgaaagcatttgagactgggggtcgtgaaaataaagcataaaactttctgcagatagactgagttaagccaaggccacgtcataggagacatgcgcaataatatgcaagtaaatttattttacaataatatgcaagtaaaattctatttctctatagagcacaggaaactaaatgtatataaattgaaggtaaagtaattatctaagatcataaggaccaccctaactggacctatgagtcagaatcaaccttttataatcatcatccgattcagtgaacagattctgcaagcatttacaaatccatagtgtacacaaatgatacaaccaaagtatcatatagagcagatgatgccaaattagatgactaacatcagatcagatataggagcactgaattttcttttcttaacagtgcaactgagttagattctaaaaggataaacggtactattgatagataagaaatggtagtattgatagtttctggcatagtgagaagcaatcagaatcgaatgcacttccagaacagtatgcagaatattttataagttatagagcaaacctgttggacaaccataaaatcattagtaaagagactaggaaaaagccacggaacaagtgttcctactgcccccacagtcgttccagttattgctccaatcatgacaagtgatttcaatagcatccttgcctggataaaacggtacctttagactttagtgtctttgtagtaatgaacttaaaaatataaatgcactttaatgtagaaaagaattccagtagaagatatgcactatgttagtcaatcaaagcaccatcagtgccgcacaggatgcatcaagtatgtgtaatgatgctgagcgtacaagcacaagcagaagcaactgttactctagtacaggaaaagaaggtatgtgtatggcaagcaaatgtatagaaacccttgatggcaaatgcacaactccgattcaaatatttattttagttcaatggtagttgtaaaccgtaaagatgcctcatgtcctaagaggcagcaaataagtgatgggatcaagcttttgttaatttcaacgaacaggattaatacaagagtctcagttgacctcttgcttttaccttcagccttttaactgtgtatcaaagctataatttttgtccagttaaattcgacctgccttgaccgccaataaagttgatatttatttgtggatagttttgcagcagatgtaattcaagattctaaatgatttaataagcttagtttgtgatatcagcattttatttagaagaaatgtgagaaggagcatgtactgaaaattacactgttgaaggaaactttgcatatcagttcggtttatcctaagttcttgaccagagaaaagcgtaaaaacatataaagtgtgcaagcatacatcatcaagctttacacatgattcctttggattaatatatcactaaggacaataataatgcagtacagaaattcacgtgaaattgagagctttagataggtaccttcatcaaattgcacttagctccatatatcaactctggcatgaatgactgtgcagtttgtgacaggggctcaccccaaacagtgcacatgcataggacattaaccataaccttcacagcatagattattttgtatgttatccacagaagaaagtacatagtagcactgtgttttcatcatgggtaagcataccaaaagttaaaaggtatgaacctggtgggctgcaagtgttattgctcccatagaagttgcagaatacgtaagtaacgcgtaaaatgctacctgaatggtttcaaataattaggtatagtaaagttgaggagaggacatggaatattagaacaaaaaaaaaagcataccttggaggtcattgttatgaaaacaggagctgcaatttcaaaaatctgcagaagctcacttgatgatgggattgtgaatgaaaaagctcgaaatcctctcttatttagattttgcatcatcataaaagctgcaacaatctgagtgtgtgtcaaaaaatagctatttatgaaaataatatgttgtcagaagactcaattgtgtaaataaattggatttttgtttagcataacaagtagctaaatgtctggcatacaagttgagtagacaaatcataaagaaagatcgacatggataataatatataaaattatgagcatgtggttccatcaaaaacataacattttacaatagataagtgattgctttataacttaactaggtagcatatcttactagaagatcaagaaacatttgtttttgttagtaatgtggtgtttcatccgattcaagtttcaaagaaaaatcaggtagtgtttattaaggctaagcattggtggcaatccacatcttgccaagtctaaagaatcatgctcaagtaaagatgtgcaagaagcaaggtatgatgaggtgattggaaagtatgcctacctgtgaaaccatagttgcccaggcagcgccagcaattccatatccacatacagaacagagaagaaggtccccaacaccattgataacactagcagctgccaatgccttcaagggaccccaagaatctttcatgcctagactgagttatagcaaacatacagtataatatgagaagcctccaatcaaggtagttgtaatgtgaaatcaaatagaagagctcaaagtgtttattgttatcagaaacatcacaaccaaataactatgtagcccatgcgagttggttcaaatggcaatatgaatatttcaatgacgaatagacattaagacaactcaaaacagatgcatctgtaatttggcaaaataaaaggtcaaagaaagaagacatgatagatttgaaggcaaaagaaatataacttctccagaacaaaatagatcccgtgcaacagaagaggagaagaatgagcatggtttttacctagcactttgagcaactaagccaaccagaactgcaggccatgcaaagcctctaatctgaaaatgaatgagtatacatattgatctatgtacttcatataaaacatggaagtcaaaaacttacatcctatagcatagtgcatagaattatcctatagtacagaacaaggtatgcaatatgcctgcagtcagaagcatccatggatttgcataggtttctgaaatcaataggtttgcagtcaggatcatcctcgtgtttgtacttcagtgcaggaaatgtaatcagcgtgcctcatcattcagtatccatacagaggtactagaaaatttcatcatgtttccacttccttgtatatgtatagctatagtatagctctatgaggtttagttcatagatagcatgcaattgaacttttagccatatttgtttatcctcaaaatttattgactatttgactgctttatacagttatattcaagaaagaaacaagcaattcaaaattgccagacaaacatgatttctcttggcgctaccccaagcatggcagatgtccttcaagccattgctagtgagggcgccctttggtgcctagcaggagcttctaagcttcgtgatcttttgtctagggctgtagagctagtgcactaggtttgttttgcttcttgtgggtgtgtggtgttggtgttgtacttctgggtgggtggatgtcagagtttatatctaatgccatccaccttttttcctctatcttgatgaaatgatacgcagatttcctgcgtgttcttaaaaaaaacatgatttctcttgctcattcaactagggcaacaatgaaaacaccctaaacagtgaaattaatgagagaatgctgacatgtacaaacctgtgcatatgtattggcagcagaaatgatatcatagttccccgatccagtaaacactgaaaataaaaatagaggttgcagtaaaattaagaaggtaggtggactcagacatgagacatgtgaaactctagatagcatgataaatacaagggcattcaatctgagaagcaaattaaaaggaaaaaacagaaataaggtgcactgccaaacagggagaaaaacagtgaaggagataatccagtggtgaaagaaatccaccaggttttctccatcaatatgcagtcaggttcttcaaagtatgataaacaaggttgacagtcagtttcatcttattagcacagtttagtttcaacttaccagttaacacttgagtcccaaaaagcttggtgaacaaaaacattcctaaaccacaagtaagagcaacaaacagcaacatagatacttggtgctgtgcaagttcttcatcctgcatatagtaactgtgcttataaatagagtgcggagaaaagacatgaaagtttgtgcgttcattgttcaaagttaataacctttcataaaattataaccaccactaatttccacaaagtagggctctagtaacatgccaagcaccaagccaccaatattctcgccatacagagagttttatagttgaaaacagtttagtttctgaatttctgagtggcctgcaaattgccgagtaatatacatatgtatgtcctgctgcaatgttctcgtttgtagtaagaaaaagtgtatagttcatgcaagagaaatcaaaacattaacttcgaaagttttcaatttcagcttgttattaggcattttttgtacttttgttccatagtcttatagaggaaagggagggagagattgttcacgccgaactaagttataaagctaagtagcttaggttggcaacaatcaaaattggaatgttaaatttgttttaccactaaaattctaacagataaaacagtatgtaaatcatactatcaagagtagctaagttaacaatatatgtttctgataactgcccaagcatagcatattcctgcctatagttgttcatctaacaaagaggaaggtacacctttttagctaaggaggtggccaccatgttggaggtcgcgatcgaaaggaacatgaatatatagcagaggtaatcgcagaacaccgttccaggccctgaaattgaagaaacaacaaccacatgacattgagctgcaaagaccctagcctttgcacgcgatattcatataccacagttcatcagattcagctaattcggttagcaaaatgtcgcctagttccattttggagattagcaggaagcaaacgcagatgacatagactaatttagttaggtagcgagcaaggggagctaggcgttgtacctagggcagcgagctggagggaggaagtctggccgatgaccatggtgtcgatgaggctcatgaggggcccgcagatccagagccccagcgccggcccagcgaacacgacgatgtcccgcacctgctcccacaaccccgccgttccagccgccgccgccgccggctcatccccatccgctcccgccacggccaccccgcggcagcgggcggcggcgccacgggggaggcgcggcggctgtggctcggtaagcgggcggctgaggacgaggcgtgccgcgcgggcggcgagagcgggagtgggcacggcgggaaggcggcgggtggggaggagcgccgggagcggcgcggcggagaggaggcggaggtgggcggacatggcgccgcgctagttgtagcgggagcggacggaacgacgacgaaggtaggcaggcgcgtgccgaaaagacgttagcagtgacaggcaaaagggcatgtgtggttctcgatatgctgctgctggtagagcctgcgtatatacgtctccggtattccaggctctccatttcacttcacacgaatcacctcatttccaacaaaattcctgtgaatttccgacaggaattgcagatgaaatagttttagccttttggcagcaagaggtcgcgcaaaattttcctacacatagtaaaccatccaacattcatcaagttgtgagtagtagcttcctttatttgattaaaggcaacttctgaaattctccgcgcgtcggagaagcaagcttgggatatcatatcagtgaccaacatattacgatcaggaataaccaggaaaacaaacgaggcagcaccaagattcacttgcaggactccaatataaaccagatacacattatactacagttggcaaaaaaatatagatcccaacccatgaacagaccaaaaacacaatgtggattaagaataagaaaaaacgcctatgtgtcgagctcgagcacacaggtgctcttccctattctgtgagagtcaaaatcaacgtcgaacaaatgggcattgttcccatgcaatcgtttcaagtgttcaggtgcctctgaatgaaaataccaactatgccgcaaactctaatctctgcttgccaaggtatacatagaagatgacggttccctcacagccgatcacatgaaatcgtactcatccggatcatcaaaattaccctttccagggatgaaatcatcgtctttattctcaatgtgtagctgcttcttttttgcccctacagatttcgttgcaaacatcagtaccaaaagaatgtgatagaaaaaacagcttacagtttgacatcagcaccgcatgtaggacataaagcgcctttgacctcaccttgtttctttttgcctgctgcagcttctttctcagccttgatcttttcattagcaattgctgcaatggaggacgatatatctttcgcatccgcacctttcaatgatgccatggaaagtctcatgacattcttgagtagacccatatagtggaagcttttctgtatacatgaagacagggatgaaggtcagatcctgcagagacaattccccaataaacgcagatttcaaaatgttcaaaaaacctcatagggacgcagtttgtttgcaataagctctgcatattccgcaaagtcactctcagactttgggatgaaggtatctagggacttttcactgccgtccttctttccaaaaagttccgtagttgacttaaagtcagcttcttccacaagcctacaatatgtattcatcaggtgagcaaaatacatgcacggagatttgaagggcaggatgctgcacaaagctcaaaattggacagtgatatagactaaaatcgggaaacatggtagcggcaagcaaacgggcaaacagcacctacaaagttcttcagcagacctaaaaaaatagcatatacctttgttgacgaagtttctctagagcaggatcatccagagcctcatcttgaactacttcagaactagttgatgcttgttgttttcctttcttcgcagcacctttcccactaggttttggtgcagtcttttctacaggtggtggtttaggtttctgcattgcattaaagtattcaagcacaagtgctgaatcagtattgcactacttttataaatcactccctctagtcaaatttatttggcattgggagaactgggtttagttctcccaaagccaaatattttttactgactactttatataagataatcatcaaggcaagaaatgctaataatcgtgcacaatgtcaaattactacagcaagtatgccaccggttaacactcacaaagattagaattcttctacaagatacaatagggtagatcaatgactacataacaaatgcaagctcgaagcacgtgaacagctgtattgcaaatcttcaatgttacttaactaatttcactcaaattaaaatgaaatgattgtagtaatctaggaggttcctacttcagaaatgcaaattaaaagaataataaaggaaatggcatgaagggaaacaaaaatgtctactgagaaactattgcggatctttcaccctacctcctcctcctcttcttcccatgattcttttacatcatcttcttccacatcttcatctgcccacttacttttaagcggctcagcttttgcactaggcactgcgggctgaaagtcttcagaatctgttgtgatagatttgttccaaatatgacaacaggaaaacataagctattagcaaaccccaacatcagaactcataatgaaattcagtaataagcctaataaattcaaagttgtactgcagcctgcagaaactttgatgcattcatattctcagactagaacgaggtaatatctccttttactacaacaacctttacaattgtaacataagcttaccctcccaaaataaactgcaaaaaaaaaggtaattgtgtgcagacagtggagtcactagatacgttcaaactcttacaacaattttcaagttataagaacatcgaaggtgtaaaccaacaagaaagcagcctaacagaactggtagcaggtgaatgtgcatactatatctatatgatctgcgttctgcctagcatgacaaaattacacagctatacagtttgcaattgctcccaatcattttcagcagcagttcatatatctaattgcagactcagtctttttcaaagtctatgagcgtgaaatcaccagcgactcgcatattttcacgatataatagaacacatcaacacccacaagtacttttgcgtctcaaactaatcaccagaacaataccacaatacccccaacccaaaatctaaactgtaggccaggtaatcgagcaaccgcgcctttagtcttgcgaacaccttgaactaaccaccattgcaatcacaagttcacaacccacaaattgcaagtatattccgatgcagcagttcacgggttcagggtacgtattaccatcatccgatgaaaaaccctaattccaagcccaaaaaaaaacatacggcgacctaacaatcagcgaaagttaacatcacgcaaagcgttcagtcgcgaaccgcgccccctggagcacgagccgtacgcatcggatgggcaagctccgcggcggcagcgcgtccgcggagactccactgaaacgagaggcacagatcgggaagggagagattcgagaggcgctcaccccagtcctccatcgcggcttgacggcgtcgagatctgaccggtcgacggcggcggaggggccggagacgaggagcaggcggaggaggcggagtccggaggtggccggcgagcgagggcgggcgcgagcgcacgctagggtttccgcggccgagtcggcggcgccggcgccggcgggaggcggaaggttctggagggttgggggttcggggagaggaggtgacgcgttggcttcgctggccttttggttttgcttgctgtggcttccctttttctcttgtagttgttgctgcagttggtgatcgcgcccgttgagttctaatcggacggtggatatgaccccacgtgaaaacgggacggtcacggtatcacgcttgcgtgcttgttcctgactttctggattttaaaacttagcaattactaataatttagagttaattttacggggttttttttgccatcgtggtttattttacggtatttacttttatattgttaagtacatgtatataaaaactttatctataattttttttactaataaactgtataaataaataaacaaagggataattgcaaatatgccattactttcaactcctaactcgaaatagccattataaaaacgcaaactgcaaatttgccatcaaagttggttttctatgcttccgtttgtcactgttgtcccaactgatgcaattaaaaggataaaaataattcatagaaatacattgcaacttgaaagactgttttgcccttagctaagtttataccctcccagccctaggacccgacttgaccgcaagctagaatgatcccctccttctacctctatgaaccatagatctcaaatcctctcatccatggcaaggaaagagctaatggattttgatggcggcgggcggcgacgggtaggcagtgggtgttttggcggtcagaactgcaggcgacctcggcttgagcggcggccgcagtagcagcaaatgaaggcggcggcagcaaagctgcatcttgggcagcagcaacattatcaggggatgcagcagcagcaagcaaatgttggccacaacagcagcagccgacaactacatctaagcatcttagctcttaggcaacaacaacaacattagcaggcagtattttcgtgggtagtaggccagtaacagcccacggttgcatctcctaaggcttttatcctccttttttttttcttatacgataagtatgccaaaataatgtttatcttgcaatttggtggataggggtatccttgtcctaaatttgataaaaaccaaccttctaacggtgatagttcaggctgtcggtctaatggtaggcaggttgggttccaactgtttctggtggtaaatatgcaattatactttttgtagtggtagattcacagtactggttgaaaccagtggtaaatttgcaattggcccataaacaaaaggataagcgaatcaatgggtatgttatttttttagacagatagttttccttgtcttatgtgatttatacaaattggcccttcacttatgtgtaaattgttgtatctgcagaaattaggacaatttgagatatactacatgtacatcctcggaaatgtgaaaaggaaaactatgatcagcagttcttggttgaataacaaatttgtctataatattctttagatgtatcagttgttttgcagatatactccatggtagatttatacagattcgtaatactaacatgttcacatcttgtactagattttttttttatttcaaaacggagagaatagtaattaaaaactgcttgttgatagataatgtactaaatttgtttattttaaaatatagtattactagttgatagttttctcatttttccgttcgttttgatttgaccatatagcgctcttagttgtcattttgacaagacctcaatttcaaaatcctacaaagagctttacaggatctacaaccagaaaagagaatttggttaaacaattcaaattttaatctcattaaaatcaatcgattaggtgcatgtcagctttagtcggttcccttttttttttttgaaactcagaagcagaactgtgataaattgatttgtgcatgccagcatgtctgcagaggtttcctctttttatctccaaaagttctgagctagcaataatatagttattacagctaaatacacctacattctttgcgaaaatgaagaacacagggggatctcagcactcatctaacaaaactgtcagaaagaacgaagacatctacactgtctatttacacaatcaaactgaaaggacaagctactgcacactgttctacgacttgaggactgctccttccgttatcttccaccctcctagcttggagaaggccatctcataccgggtagtgtattttgtgtcatatgaatcattgtttctgggctcagtaacatcagtaagttggcctgcctcatcaatcgtagcctccacagtcgctcgtcgaccatctagggagatagtgatgctatcaatcgtcacatcggatagtgtatactcccagaaccacccatgacgctcaatctccgctgctcggtcagtccacacctttagcatgttgccatcaagaacctataagaacatggaaaatcagtaccagcatttgaccgccatcatcacggggatatcatgcagtggcaatagttcttgaaaaattgttcagttgcaattgaagcatgtgtgtgagtcaaacaagaaagattattgtaaccaaacttgtaaaggtacattgcgtgaccaatatatcctataggagagttatatctgaattatctctctataggaagcgtaggtataggtaagagcagtggccagctaggaagcatgaaaagtcaaagttttaaacatcacctcttgcaatgatgcaaccgaatgttctggtcccaaggccttagatttgatactctgccacttgcgaacaatatcttctgccagcttcgcatccattctaggaatatgtactggatcttcatctagtgcaggatcttcaacattcatcatgcaaaagttaactctctatgatatacattacagaattatagtagcattgtgtatgtatgagacaaaaatatttgatgtatagctttgttaaaacattaatgcaaagctataagatcaagaacatactgtaatcagccaacaaggatacccagtaaacacgtgagcagtaaattccagtgttgtttgactactttagcaaatgaaaagcatttactcaccatcagtagagtcgacactattagcaactgccacagatccatgctcactcctaatagcagaaaggggcctcttacgaggcaaatatttggccccaattactgccaacagtgcaaacagtgcgccagcagagataatcttcaaggcggcatttctcgaatcatgagcaggtgcattttcctggtcaaaattttcaagatatcccccagggccatctttagtattttccatggctgacctgtctaactgttctatcaatggaaaaaccttgttgaacgcttgaatagcatttgatttcacagtaccaagtgcagctgtagcttgagcaccaagttttgcaatagcagcagcagcagccaaatgagaagcaccaccaccctccatcctttctaggtagcttaaaacttctggatcatcgtagtaatctccaagtctgaactgcatgccccgagtatctctgctcctaggaaaaacctcaaagataagccaagtctccaaaagcttgcacagccctggaagaagatcattctcttcactgatgctagagttggtcacaataaactctagaattttggggtctctgtatggtgaagactcattatcaattccaagccacattctgcacttgctaacatctccgactagcaatgagcagaatgccctttccaatgcaaggtccatctcattatcataagcataatgagaacctatgttgaacttctggagttgttcaaaaagatcatccgccatcatgatgaattgtggccttttacttataattgcttgagcgacatgtgcaagtgctacattgtaaatttcaaaccattcaggaggaatgctattcggtgtttttgaaaagaaatccatctgggaggtgtaacagaaagggagttaacatgttttcaaagatgtgctcctgcaatataaataggcagctgcttcataaaaacaaacatgtacgaacctgttcaattgatgtcatcctcaaaaaagcctcgttcatgaaggcttcacgagaaaatcctcctccaacggtagcaatacctcctctgccaacgctccacaaaatgtttctcgcaccttgaagcccttcttggcgcttcttatgatgctctgtgtcaataggaagggagagaagctccaatacacagcgaggtgtaatctcctcgagagtttcatcaatctgtgaaagcagatcaggtgcgagattgcttgctccatcttcctacagtatgaagttcctattaatattgcttcaaggaaatcaccattcttattaaaaaaatatagcccatgtgtcccaaaccaatcttcacagggttatttaatcttatcctattcaaatataagcccaatgaaaaagtagggagtaaaaaagcaaacagttcacctgcaagagcttgagagccctctcgagcacctcgcagcagccaattacatctggagggcttgctgccatagcatcccttgatagatccacataagccagagccatcgctagcaccacgtcctgcttgaagcgcttgggtggccgatccagaagcaactgttctccagttacaagcacagcaagtgcctccccagcctcctgaagcgcacacaacacacctggaacctgcttcacaagacacccaatatattataagcagagagagattatacactagtgctatttgacaagatccaaacacaccctttgctgccccctaaagcctcaccttgtcccaagcaatatccatggtgagagcttcttcacggttctcagaaagcgcacgatcatactgagtgcgggagttctggttcatgagagtgtcatgggcaatctgcagcatttgtcgacgaccaacaagagcatccgtgctgtagccatactgcggtggcttggctatccgtgcctcgaacgccctcctgatgccatcgccaaggaaatgtggctctgcccctagaacctgagcaaagccagattcaacaaaacatttcggaaatagtcaaaaaggcatgatctctcactagccccacacacacatgatataggcataattcgtatcatagtatgcagtggatcacaaatgcgatggattcggcattgtagtcagttaataacctagtgaagtgacactacggaaatagcaaataactcgatttcatggaactgagggatcagtaacctagcaaaagacttgcaggtggaataacgtttcaacgatttagcagtgacaatgtatcatcacctaccaagaaggcaagaatcatgcgcttttttttatctacgggatgatattccgaggtccaaatgatgaacaaaccgcagcagattcacggggcctcaccttgtagaaatcgacttggagcgggagggagcgttcggcggcgtcggggaagagcgggacgaagggggaggcggagggcgcggcggccggggccggggccggggacggcgggtcggagggcgcggcggtggggaggaggtggaagtcggcgaagaggcgttcggcccagcggctcgcggcgcggcaggcagcggaggggtgaggcggcggcctgcggcgcgggcgcgggcgcgggcgagggagggagaaggcgaatggcgccgagttggggcgggcgaggaggttgtggaagccctccattagccgccgcggcggcggcggcggagatggagggggcggaggagagagaggttttaggagtgagggggagaagagggggagccttgctggctttggcccttgtttttttttttgctgttgttttcttgttgctggatgatctgggtgcatgattggagacttgggcactttgggagattttgctaggtccagtattgagacaccaatttcaaaactaatcttgctaagtctaatattttagggtgtgtttgaaaggagaggaaagaagaaggttaaggagatatgcaaagcgaagtgagtcattagtgcatgattaattgagtattaattattttatagtaaaaaatagattaatatgattttaaaaacaacgttcctacttaaaaaataataaaaaaatatattgtttaaaacttcagaaagcgtgcgcgtaaagaacaagggatttttttttcaatcaatcagatgcaaacaaacaacacattataacctcatgttcaaaaatagactacagatttaagtctcggattttaaattttggttatatttaataagctaacaggcatatgaggaaaggctagactttgtttaagagccaagttttttactggtttggagtcgggtgtgaaagtggaaaggcttgtttaaagttgtaatcagttttggtttgtttaaaagcaaggttcttatcgaatggttgtttgggttgaagctttttacccaaagcccatcatcttgctaattagactaaaggctttcaagtttcaaccaaatataagcaagagatccttcatcaagtcatttaaaggcaactttggctgatcagtttaagcatgttgattgacactttttagattacaatgctaccaagtgacaaggatataccccctcccccaccccacaaagttgacgatgttgggctatgatgggatatcatcaaatcctccatctaaaaagtggcaaaccatcaaactctcatgtttcaaatgttttttttggcttaaatttagatttttgggggctagttcttttcaggtcaatggataaattgatgatgagttatattacttcacagtaataatacttgacgacaaacgaacggattaactattaaaaaacaaaaatattgttttagaaaatattataggagagtgaaactcatatatagaaaacttttgcaacaattacactgtataaaaacttacgaagtgtgttcgtggtaattcataatccataagagagaaaaagggacccttaagagttgattatccatgtccattttctcaagctcaagttacagatgacaacaatatgtgaatcacttatctctacagaaaatgcaccgggcatacgtaattaaagtcattatgatttacctcattaccttgtgggtgaactaatatgcagtcttgagaaccaagcataaaaaacgagattttgagggagagatgtccctctaaacaatttttaagaataaattataagcttgttgaggattgaacactaaatctcagggttaaaaccaagagaggttgaaatcaaacaccccttgtcactgcactattaagtgtaactctcgagaactcgagaactaagcatagctcaggtggcgtgatgtgatggtgttcgccagcttcttcaggttattccgcttttgttccttcaaactatttaaacagtcttcaacagaaaattacacaatgaaagaaggttttgcagtgatccacgttacacggtcatctcagacaaatatgtatgccgctcgaagcattgtaatttggagaatgccactggaaaattctgaggatttacaatttggagtttgagagtttgagacacagtttcgaaatctgtaaaataccactaggaatcaaggttgattcaacacgtcttattttcaagtgtattgtaatttgatactcgtatagcttatgtagtagaaagttaatactccctgtatatatgggctgctgtcagcaccgattctaagtctgaagatcttgcagaaaacaatcagtcgacatctgaacatctgaactccgatattcaataaagcctatgatcaaatttggacaaatcgttgagaattcaaaccgtttgcacatctgaactctttcatgtcattcattcactatattttttgaacagagacgaaccaatgaagtttgagagtttgagagttgagacacagtttcaaaatctataaaataccaccgggaatcaaggttgattcaataccgtcttattttcaaatgtattgtaatttgatactcgtatagcctatgcagtacaaagttactactccctgtatatatgggctgctgtcagcaccgattctaagtctgaagatcttgcagaaaacaatcagttgatcaatgatcatgcgtcatctgaacatctgaactccgatattcaatagaacctatgatcaaatttggaccaatcgttaagaattcaaaccgtttgcacatctgaattctttcatgtcattcattcactatattttttgaacagggacgaaccaatgaacactgtggaaggtgaagcagctgaacacacgcaagatcggctatggagtcaaaagaaaacctaattaagaggagaatggaattgcagcactgcattgtgttgtgttgtgttgtttgttcatggccatgtggtgaactcgaagaccttgccgacgatctcgaggccggtggggatctgccagatgaagaggaggacgttgatggcgttgagcgcgatgtgcaggctccgcgccgtctcgttccccttctgcatcgccgggaccagcgccgccgcggcggcccagagcacggtgatggcggcgccggcgaagaggtgcggccccgggaagagcttgccggtgcggaaccacgtgttgagcgcgccgccgacggactcggtgacccccagcccgagcaggatggagccggcgttgaaatgccggtcccggaacgatcccttgatcagcttcttcctctcctgcatcacgcggattcaccatttcatcgatcgatccatggcgccatggcgaagcttgagcgagctggatgatggagtggttggggagagtttgattatacctcggtgagttcgtcgatcttgatttcgacaggcgacttgggtgcggaagggggaggtgaggaggaggaggaggaggagtcaccggcggcgacggcggcgggcgtggcggcggcggcggcgggcttgagctgcttcttgagctcgttgatctcgtcctggatggtgcgcaccctgcgccactgccacccgaggtagcccgcccagagcgtgtaggcgaagaggccgcccatgacgagcgggtgcagcagcgcgacgctccggccctcgaggatcccgaactcgccgcccgcggccagcgcgtccggcggcgccagcgccagcgccgccgtcgccgccgccgccgccgtcgtcctcagcaacgacggcagggcagcaggcgagccacgcgtcgccgtcgtcgtcgtcgtctgctgctgctgcctggcgctgggggggctgttcttgttggaggcggagcaggtgatgatggcgtggacggcggcgagcggcgcggccatcatggtcgccgtggtgttggccggagtacgcgaggtggttggtgaaatggtgaggtgaggacggggataaggaggggagagagcggagtggtggaaacgagcgggcgaggtggggagggggagggagacgagacgagaagagtagtgtggtgttgcgtcgatatcgaacattcgaggggacgtggcggactcgcacgcgcgggcgagcggccaagtttgtgtccgttggctctgatggcgcttttccgtgcaaaagatgacgtttttttatgggtgacgccgacgccacgcgtttcggtccctgtctccgtcgaccaccggcgatccatccaagcaccgatcgccggttggatggatacccaaaaaaaaaaaaaatactctctccattccataatataagttattttaagattcaactattaaaacatttaataaacacttagtataatataaaattaattttatttattaaaaattatatgattagattgggatttaaatttacttttatatggttacaaatttattgctacaaaccttataatatatgaaaaattataaattaaaaattagttttgtagactgtgccaattttaacggcgtataggacagagagagtaatacggttggatcggaatcatcactcaatccttgcatgtactgttggttggttggttccacgtcacggcatttcaccgtgactcctcctccccttggcccaaccacgcaaaaatagatcaccttaggcccaacctaatagctatttggaccgcacattacgttccctgtgccctactatctgggccgtgtgttctcctccgactagccgaggccggaaatctttgggccttgacatttctctccatccatttttttttgagtttttttttcttttgaaaaggacggatggtttgaaattcaaaattggaatggaatttagaatgccatcgtttgcaaagatcatgactcgatgagaaacagacacaagaaatacaagtcacgtgttactaccagttattattaccacgaaacaacgacgatacatacatacgcatcgagatgccctgcaatatcatcagtcatatataaatttcactgatggattaccgcggtaattaactaattaacctcaagcaggattaatatgcagagatgacggtctaggccggcggcggcggcggcagcgagcggaggagctcgtcggcgatggcctcctcgagccatccctcggcgtcgcccatgatgccggggctgagccgcaccatcagcacgcagaactccgcctcgctcagcgcgccgtcgccgtcctggtcgccctcccgcaccatggccgccgcctcctccaccgtcatctcgccgccgccgccgcccaggcccagcacgctcgccgcgctccgccgcaggctctccgcggtgatggcgcccctcgccgggtcggcgaggaggcggaacccggcgcggagctccgacagcaggccctccgcgcccagccgcccggccatcaccggcatcaggtcctcgtactcctcgccgccgccgcctccggcagacgcctcctgctgctccgccgccgtcgtggatcgaatctgctggtgatggttcatgctgccggccggcgagggaagccaagaagatcaagagtggtgttgagagttcgtgttgacatttttgcgggtgcggctttgtatataaaacgaagggcgttggattggacggcacggggataatgtgatgtggtggtggtgtgctgcacccaaagcttttccatggaccatcagtgacagtgatattactgccccagatgattagttattagtaacaactattatgatcattaaattaaactgcatacataatagtggagaaccagttaaaaaatagaatattacaatactaatttcttttcgattacatcgcacacgcttattgatgtgactcttaaccctatacaaagagatggagggccgccatggatccttaatcttgctaaaatcctgtagaaagtatatccgtgtatgcgtactccagaaaatcatacatactttagacttcattgccacaccaaacagatgcttcgcaaatatctacacgaataatgtgcgtacatcgatcctcaatattgattttttttaaagtttgacttaaaacatatctaaaactagataatgaacaacagcttagtagtagtatatattagggtctcctctagaagagaagatttttgcgggaatttcattgaaatttgaactgattcgtgtaaattaaattcttaccgcctgagattgttttacttccccgaccaaagactaagtaatgcgtaatgtgtgaaaaattacaagacgattggtagagcaggttaacgagaagagagacagcgtaaacctactataaacttacgtggaggagagagattacaaaatataaaggatgttgtctctcatgcaagagctagcttaatacaaactcctatgtaaatatattgaatgcataggtgagagatagagagaggaaaagaaagttgtagccaaccttatagctaatccattatatatgttggctttaagatgtgctaatagtaggaagtgagctctactatctagtattatccttgctctaagcgtcgttaggacgatcgcatcagaggagagcttccaggaagcttcagctgatctgactggcgataatccctgcatggtttggtttgctcacgtccctatcgtcctaaccatccccaccgccctgactagctcatgatcaatgatgcacgtacgaaaaagaaagtgttaaaaattactactacctctatattaatgtatatattaatgtataacgccgttgactttttatccaatgtttaaccattcgtattattcaaaaaatttatacaattatcatttattttattgtgactcgattcatcatcaaatgttctttaaacatgatataaatactttcatatttgcatgaaaattttaaataaaacgaatggtcaaacgttggtcgaaaagtcaacggcgtcatacattaaaatacggatggagcagtaattaacccactgtgatggccacgcgtatatatagaaccttctttttgaaacacaaacacacggacaattgagacattttcacacgaaaacgaattcaaaatcaataatctctcaatcgcttcacacctgatgacaaaaaaaaagagagtgattttttgtgtgttgcaaattgaagaggagatgcgtgccaagttgtgattgatgcaaagaggcctagctagcatcgattggcatcgtccttttcaaaggaagcttccgagaaggtagccatatgcatcgtcatctgcttcacattaacggatcatatccgatcgatggaatggtcatctcattcaaccagctccaccagtatactcgtcccctaatataagaaattttaatattttaattgcactgtttgaccacttgccttattcaaaatatttatgtaaatataaaaaataaaaagttatatttaaagtactttggataacaaaataagtcacaaataaaataaataataattttaatttttttaataaaatgaatggtcaaacaatataagtaaaatgtcaaaatgcctttcttttctgcagtagcagctataggtcagaatgcctttcttttcttttttgcaggagtagataggttaggtcagtgtactatggcaggattaaccggcatcggcacggccagttttacttttactatctttgttaaatttgacttgcacagatcgatggttctttgcatgagctcaacctaacccctaaattaaacaggagataaactacgtagattttttttgtcaccgattcgattcgacttctgtagctggtagaaaatataatagcgacctgtatggtgaaggtgaagcttcctcaaacaatccattttttcatccaagtcatcagaaactataattatagaatcaagttaataaactaaaaatcaaaacctaattttttggcttctctagattttcactaactgaattcccattagctaaatctaaagttgtcccaaacatcgatcccctagtaattaatagtacggtggtaaagaacaacttgattgatgaaaaagaaaaaaaaaaggcacaactgaattgtgctttataaggcggacgtgaacgtgatgtccgtcgcacagcggctgcccgcgcgacaagaggaacaccgtgtcgggggagaaacatgggagggagtcaatttggccaaacagacatgacatgtctacggagcaaaggcctggagctcagcccactcgacaagaaatgaggcccatactctcttagcccagcccacccacagaatattcagatccaggcacccaaaaataaaaaaaaaaaacaagaaaacttggcgcgcctcggctcccggctcggaacggcttcccgcgaagccgaaatccctgttcccgccaaatcctctcccctctcccgccgccgcctgctcgcctcctgtttttttaatctctacgcgcgccacctcctcttccacagtggcgccgcctcctcgccttctccatctctcctcctcctctcgccaccacggccgtgctcgcgtgcgcgatggggcccgcgacgccgctgcgccgccggacgagggcgcggccggccgccaccagggcggagggcggcagcggcggcgacggcgacgacgacgacgttcgctgcgaggcgtgcgggtccggggagtcggcggcggagctgctgctgtgcgatggctgcgaccgtggcctccacatcttctgcctccgccccatcctcccgcgcgtccccgccggcgactggttctgcccctcctgcgcctcgccgtcgccgcactccaagaaatcacacgcggccaagaagcccaagcgtgagtagccgatgatgcaagaacggataccatttcctctcgccgaattcgaacgaatttcggttggattttgagattcactctgcttctcttcctgcagagttcccgctggtccagacgaagatcgtggatttcttcaagatccagaggggcccggcggcggcgctggcggcggcggcggagtcgtcggaggggaagaagaggaagcggaaggtgggtggcatccgcttggtctccaagaagaagaggaagcttctccccttcaaccccagcgacgacccggcgaggcgcctccgccagatggcgtcgctcgccacggcgctcaccgccaccggcgccgtcttcagcaacgagctcacctacgtccccggcatggctccccgcgccgccaaccgcgccgccctcgaatccggcggaatgcaggtcacctccgaccccgccccaaattccaaatcgcccatctcgtcgcctcctcgtcgctgctaaatctcgccgccattttcgtctcaggtgctaccaaaggaggacgtcgagacgctgaatctgtgcaagaggatgatggcgagaggcgagtggccgcctctcctcgtcgtctacgaccccgtcgaggggttcaccgtggaggcggacaggttcatcaaggatctcaccatcatcaccgagtacgtcggcgacgtcgactacctgacccgccgcgagcacgacgacggcgacagcatgatgaccctgctgtcggcggccacgccgtcgaggagcctcgtcatctgccccgacaagcggagcaacatcgctcgcttcatcaatggcatcaacaaccacactccgtaagcatctcacactgaaagcatatgtgagtcaacacgatgattagattgatcacggacacaagtacatatagggacggtacatccttatctctataaccgacttatagatacagaattgggataggattacggaaaccgaaccggatacaatacaaacacccccgcagttggaacgtgtatggaacgaacgttcaaactggaacggaactcacaaaccgcctggcccttgcagaatttttgccacattgcaaattcagagcagcagtagcagtagcagtagcagcattgggaatttgggatcattgttgcctgaaagaaacatatcttgttgtgcttgcagagatggccggaagaagcagaatctcaagtgcgtccgcttcgacgtcggcggcgagtgccgggtgctcttggtggcgaacagggacatctccaaaggggagaggctgtactacgattacaatggatcggagcatgagtacccaacccaccattttgtatgaaccctgaaaattctttgattggtgttagcttgcaggttatttatgttttgtagttacaaaagggaaaaggaatgaactgatgagatccatgatccatcctcaagagatggggatctggtttgtgaaatctgaatgttgacctgggaagaagagaattgtattgttcttttgttgaaatgaaatgtgtatgtatgcaatggaacagtatctgaggaaagcggttgaaatgaaatgtgtatgtatccaatggaacagtatctgaggaaaccagtggaaaaggggttatgttaatctcttaattggtttttatctgtcagtcttctcgctgtgcaataaaaaatgattgtacaattaaatctcgttgtgcaataagaaagggttgtagaattaattttgtgggattgttaacttgacgtgttgagaagatgctgtttatgcaacaatatattttctgacgcatcatcatcttcagagtaaagatttcttttggagagtgaagctgagacaggaaaaaatgattgtacaattaaatctcgttgtgcaataagaaagggttgtagaattaattttgtgtgggattgttaacttgacgtgttgagaagatgctgtttatgcaataatatattttctgacgcatcatcatcttcagagtaaagatttcttttggagagtgaaactgagacaggatgacgaagattgcaaaatgtcgttgtggcatctgtgctacccttcacagttcaccaacgacttgcacagtgttgaggtcagcatgcgctttatagctgcatacttgcattcccgggagcatatcgcagtcatttgacagtacaatttgcaacagcagctagaggacggcagtccaccgtgagagcaccagcgagcgtgcttctaagagagaatgtaataaggacaggaaaaaaaatgttgaacagacaaatgacaaagagcaaattcgttttggtgcagcaatctaccatagtgtcaggctgtcagccaaaatagtcaatactggaagtttaagcatctcatatcaaagcgggaaaagaggtgtaagctaacaacacgagttgagatccacaaaacattgttctagagctagctagtacacgaatcgtctgctaccaattactaatacaactttcagagagacaacatcagcagttcagtacataataatagtgcgtccattgatctgaagcaggaaggtgcagcgcaggcatcatgtggagcaacttcattctctctcgtacctcgcaggtgagcgactgcacaaatgtattgcaaacaagttttcagcgcaaggtttctatagagtttcaaagatagttgtgaaaacaacatggaatttcagcatacaaacctgcggggcctatcatagccagggctggcttcacggcgttcacggtcgtagttgttaggggggctgcccctctcatcacctttgttgcccccttgcggacttgcaccacggtgataatcagggctacctctgtcaccacccctgccatagtccgggctgcccctctccctgcctcttccatagtcagggctgcccctctcacgccctctgccataaggacttgcagaccgcccgcgatagtccctcctgtctggagatcgatcacggcctcttctttctgggctgtatccattccttttctcatcatcatcacgaagtgcatattccacagagataaccctgtccataagagtgctgccacaagaatgatgaaagcagttaaggcataagatgacagtcatatagttactaaaggtgatgtggtaataaagtggcacaaattagtactcccggtaagcacatgacaagaaagcaagtgttagtaccttccatttgtaccctccagtgctttagtagcatcttcctgtaactcatactggacaaaggcaaagttccttctgattctgacattcgagatcttgccatattgatcgaagtgcctctccagatctcttgtccttgtgttgattggatcaaaattgatcacaaacaaagttttggttggccttgtattgtttggagatctctttgagttccctcttctaccaccactgcgatcctcctgcacaaacaatagatgagacttgagcataaataggtaaatatgtctaaaaggagaccggaaatatttcatttacaggatcacacctttgtccattcaaccctaagtctcctcccttttctgccaaattcaattctgtcaagcctatggatagcttcatcagcatcacgttcatcttccatgtagacaaaggcaaaccctgccatgttgaacatgataaagtagctagttagttaaaaagatatcatagtggcacaaactctaggatggatcatgattgataaaatccctgcactgaaaagattttaagatcacctcactaggctacaaactaatacgccagaataaacaggaacagaccttgcatatgtcgaactaaatgacgtcaatgtacattaatccaaacattcgtggtacatcaaagaggtggtggtggcaacctccactcgtctccagccggccgtgtggttggcatggttggattggcgtgggaaattgtaatcggacgggggaggagagtgcaacgcagaggagggtgcaatgctgatcgtaaaagtaaggcatcattcacgaggtggttgtttccaagtgaacagatgccaggatggactctgagctcctggagatggacaagagatgagcggggctcaggcaggaaaggtagagcccagtccatcatccaggaagagcagagatgctccatgatatcctgcggcaaagaaataattgagtactggacctaaacttaaagaaataacttcttttttttttctaaatgtaccctgatgtgcacttgtccaatgttttgataattaacattaagataatctggtcctgctgaaacttcttttgcttcacagtgaatgcaaaataacctcatgcatttcacatcttacaacaagctgctggctgctgcaccagggagcgtgttgaacgaaataagtcagagtctcgcatcaaggatatagcagtgaaacatgctagcccctgctatatcaaatggagtacccactcgcttttgagactcatgtacttacggtgcagtacatactacaaacagtttcaggttaataatcaaacagtgaaaaaaaggaggaaaaaacatatcaatttttaatctgtacaccatttgaacccatgagtgtttgcaacaatacgattccacaagaattatcgtatgaatctacctggattaacagtttagcaaacaaaataggaaaagttaatatggaaattttcattttagtgtgaaattcatcagcagccacttgtcagctgactcttttaaaagcctctgttgctggcttgaccagtcgaattcttttgatgcgaaacaccagataggtgcaatatggataaacaaatttgaaaacagtgcagcttaaatttaagaaaaaacaattgagagcaactgccttacccgacttcatgtcaacacgctccacacgtccatatttgctgaagaggcgctcaatctcagattggcgagcatcatagtcaaggtttccacagaaaactggcctcattttaggacaagcaactcttctcaaacctatcccagtaaaacgaacagttaccttatggagatacaagagtgaaactgatataaagtcaatattctaacataaaaatggtaatcaataaatgttaaagaacatgggcaacactcgtagctttgcaaaagacaaacatattcatattttttttgctacctataggccaataccaccatagccaatgctaggtttactttcatagaaaaagctatgaagtgatgtcagtattgggtcaagaattgggatatagtcactccatacttttttaactttaagcatattcaaaaatagagactggagtcaatcctaaaaactcaaaaccccttacagttaggtcagggattaccaaggcaaacatcaaggtgcccaaaatcaaactaaaaccagcatctatgcagacaatcatagagaccatattgacacttgaggttttctctctctcccccctactattcccctcttcccatgtcacgaaggttttggaattagcatcagaacaccaaccgaatctaaaacatcaccagtttcccctcaacagcagcttcatcccgagcgagcgaccaaccaaatcccgcccaaccaacaaccaccagagccccacccaccttgtcgcgctcaaacggaaccgcctcaagctctaaaggaccgaatcccagctagctagaaccctatgaaacttcgtaaagcgacagatctgagaaaaacctaaccgtgtaacactagccccagatccaaaccccccatcccccaaaattcaaaacagaaccccacacacacagcgccacctccgtcgtagcacgcgtacctccggggatagacgaagggaggagcgggcggcggcgcgggggaagacgacgacgacgaggacgaggaaaccctaggtctcctcctcctcggggcgattggttcgggcggcgccggcgaatggagaagcggagaggaggagagagtggggattggtccgttgcggcgtagcgagggtttttataggcgacgacgtggacaaggtggggatggatgagttggatgggggtagatattttccctggcgctggatggatgtgggcccacctgcagtgaccggtcggagagctgctggagcctatcacttactcctattcattatgcttgtgcttataaaaatttgtaaataaaacttttatatatgcgattttagctatctaaaagcaaatgttaaaaaataaattttaataaaatattcttaaaatcatctttaaatttaagattgaaaattctaaatttagctgataaagataatgatagacgaaaagatgagaccatgagtggtggtgacatgtgatggttaggctgatagggaccgtcttcttgataggtattggatgctacagtgttagacagaaaatccgataaaaaaacacccggttttcacttttttttttttgctcatattgctttggatgagttgacaaaccggtcaaattgttaaaaaaaatacaaaccgaattttttttgggtaaatttgttctaatcccactttacagattttcacacaaatcgacaaaaccgttcctgtttgcaaaaggttcttttgtgaacctagtactatgtacagacgaattgttttgagatgtatataaagtcttttcaataccaatagaggcgggctaccgcttctcgttgatatcaatagtaaccaatcggttaccaacaaaaaaaccgaagaaattttacccattatttaattttttgtttgattccttttgaacttcttgtaatcaaaatatcgagtggtttcctctaccactgcactgctggtaaaccctgttattgaaaaccctgcccttttggaagaaaaaaaaaagttggcaacacactacagtgataagaaatgaagtgagcaagaagatggatgccttatatttccattttcaagcaatcagccaaccatatgcatccaatttgaaccagccgttgtcaatttgtgattagtaaaacaaaacgctgtgccaaaacaatgtttaccaggaaatgaactaaatataaactgtcttaatgtcttaccaccgtgccacggttgacaagtacgtacatgtctaagggcatcaagcatgacgagtagaatttacattttccagacttcactacagtttatgaacaaagttcaagcccaaaatctgtataatacagcatggatgcctctacctacatctctggtttattataaatagctgaattctttggtcttcgcaccgttccttccaacatctctggtttttgcaatttgcattgcccagattgcctactccagtttgtgaagatgtcagaagaggatatccggaaattatgcacacatcgcctttccaaaattttgtacatgacacagttttcatttgtccaacgatgaaatgccatatatcagatagagataggcctgcaactctcatgcaaatgaatgctagcaaatcgtggcatgcaggtctgctagtctgctactgcttcgaagttggaacttggaacacaaacatcaaggtcatccatgcaagggcacttcaaaattcagacaggtaccatcaccactattgttgcaactgaagcctgaaggccgtgcaacgactggagaaaatcgggcgagcactggcagtgtcagctaacagaacctgaaatggttatatatcgttattgttacctctactttgagccattcaactttgaatcttttaggatatggtttacctgcagtcggtagtgatactatggggacaaaatttcttaggcgatatgcttagagggcagccggcaaaccaacagatagttccatgagcattaggaaggcaccaaatattcatgcttttgtcaaatgattgtgcaacctcacaaaatcatccaacaacagatcagaaggtctagcctgccaggatggacaattagatgcatgttttttcttcgtgtgtgtgtgtgtgtgagagagagagagagagagagagagagagaggtgttactgtaactggaagaccaatgttggccagagcagcctcaatctcagaggaagaacacaggtgctggagtgatttacgaagcatcttgcgcttcccattgaaagcagagttcacctgaaattgaaggataattataaggcaactagcttataaggacatcagggatcaactagcttagaaggcaaaaatacaggaaacttttatatgcaatgtgacttgccattgaaaagaaacctttgtgagaaccaactggtggataatcccctgaattctttagcttaaagcttataacagcaccatcaacctgaagataaaatcagctataagactacaagtaatgtttacagaaccaaaaacatcgcctttttcaaatgctaagcaatgtgtaacacataagtcataactggttaccttcggttgagggaaaaaatttgtcctctcaactttgaacttgtattctggttctacaaagaacaaaggaagtacacaagcgattagatgcgaaataatggctaaatgatatgtgcggtacatatgctgaaaataagcagaactttgaagtagattcctttactgtttaaggcatggacgcaatgccttacaaaaattgcactggtgcatatgacatcaattatctaagcaaatttttttacgcattccaaaaagaattcgatgaaactcttttaatataatcataagaggtggttttcatcattttaaggacacttccatggctatgcacatctaaaagtcaaaagtagaaaacagagcagataatccgtatagaagcatgaacggttattcactttaaatattttttcgccaacacgcaagagctttgcacatcagtatattagaagaagagctgaatacagatgtgaccctccagaggctgtcacacagagataagaggagctaacttgcacagtttgattattacgaaacagaagaaggaaaaaagagtagtaaacttagtggcctcttagatgataagatcatatgaagttggccaactacgaaggaagtccctcacagaacattgtaaacagcttacctgagtagaaattcacaaacacattgataggtcggtactctggtgtttgtattgaagcatctgcaaagcgcaatgccgtttcatcctgaaaatgaaatttatagttatgtattttttgtactacatatataatgaattatggtccagaactacacatccaataaaaaaataatcagaggtagcaggaatacatggaagataaaaagcatttgtgtatcaaaacagatagataaacaaaaaccagtgggacttaaatacaaactatacctaaacaatggatactagagcaaacatccaaaattaaaaaaaaaaatcaaccagcactaaccaagagttaattgtaaatgatatattgctaatacacgtgtaaatgggaggagattcacacctgaagcaaaagcaccatgacagaaaagacatctcccattgggagaagaagtttgacaacttcagtacttacattgaatggtaaatttgacaccacctgcaaagtacaaagtgtcatgttcaccacaaaccagcttcattatgctaaacagttatctaattatgtacacacttcaatgaaaaaacaacgattctgaacatagataattaccttggcatattttctcgtgtgatgggatttttcctccaggaaaggaagaaaatgggagcggacattaaattttgtgatatcttcttcaatgatctgcattatattcttaaaatcattacacatcagatgaagactagattttggtaaaggcaacagcatattgtccatatcacattcgcatttctagtttcataaaatatgcaataggattatccacatatcaatcttcaatgactggaagaagagtggatagtttaaatggcagtattggtcatattggatgtcaagaagagcaactatagaaacacggaaacataaaaaaaaatgcttactgaccatgacaagagcaaagtgctattagaatcttaagagcttagatcttactacaaccatctgttacaacgtatacttgttcatatgctcaagtcctgagacccaactagactatgtagtaaaacccgttttaagtttattttgtccataagtcacgagaagccataatatgtgaatcttattaccatgtatgggacatgcctgatttggttattagaatgtaaagcaggttaagctagcgtgcaatttggtcataagagcattatgctatagcagaaggaaactgtgtacaacaaatgctggacagggaaatattgaaactagaagaattcacacttcagagcttttccataatgcagcatgtgtagataagtagcattatttttatctcagcacagcataagagtggtcctgcacttggacttggggaaaaaaatcagagttataaactaagggtggttattctgaggaacaaataagcaacatcatggattaccatgtaaccaattctagaaacaccaatagtcaaagaaatggatgaaacaatccaacgtgttggtctaagaacatgaaactaccttcaattgttctgtggatccaaacctatcattcacaagggtggccatatgcttatcctgttaccaaagcaaacatgatatatggcattgcagattatggaccaaataaactagtgaaaaggaacaatgacacggtctcagcagctcttagcccaattcaagccaatgactagcaatgccgccgaccttctctacggcgaagacggtggcgccggcatcgaggagagcggccgtaagagacccagtccccgggccgatctcgagcacgacgtccccctcctccacccccgccgccgccaccagctcctcgttcaccttcgagttcagcatgtagttctgcacggagacgaggggccagcgtcggcatggcgcacgatcaaaccgagggtttcgcggcttgggggggggggaatcggggacgggggggaggacgaccggaactacctggccgagggatttgcgggggacgtggcggccgcgggagttgagggagcggatggtggagtggtagccgtcggtgacaccggaggcggcggacacgacggtggcaggccggctccggacgcggtgtgaaggggtagcatgaggcggcggcggcggaggtggccggcggcgaggtgtggccggagacggggaaggacgcggtggcggtggggataaggaaggaagcgccaccattttgcaacgctttgcctttctccttttcccgttttgccctttttcacatcttttccgttccgttacgtgggccgggccgggcctggccttgaaaggctattctcaagcccaaatgaaataaattatgggctcttgttcttttccctgttacgaccggggccgggccttgaagggctagtctcgagtccaaaaccaagaaattatgtttttaaattttttttataaaacaaaatccgttgtacaaaaccttcatatcgaaatatcatcagatagttgtggtagttctgaaagtatttctcgaccgttgattaaattggtatatattgtttaaaaaaaactagtataaactcctcttacatatcaagaaaaactaagtaaatcagggataacaatggtactgcattggtgttatgttaaattgtatttctttttcctcgttgtgtaattacaataatgtgtttttcctagttgtgcatactgcatactatatgtcgcgataacctctccatcacctttggtgccttgaggcggacttctgaatgttcggaatagcgaatatgatattccaaatgtcatggccttttaaaaagtgtcgcattggaagtttcatactggcatggctttcttcggtggcaaagttcgtgtcaacagcttgagctacgaagcggtggcaatatatggacgaatggttgattacagttgagttactcttcggtattatcttctactatggtttgatattggttgctagtggcggtgcaagtgacataatcgatacaatgatcaattgctaaattcagagattatggtgtctagcttgagaaaggtaataagaagtaaatacaactggttagttgttgggggaaacaatggttacatattctcatatactatagatagaagtttagcaatatgtgctatctctatctttaaagtggtattttagtatttttcttgtttttagcaaattgtgattttatagatcgctgacgtttatcccataatatcaataataattggttgtaactttttgaaagtagaggatggaatgaattggtatgttgagtttagagttgtttttttaatggtagattgagtttagagttgattttttctaatctgtctttttcctacacaatccatattactaaaagaatttctaaacacatcatcatcatcatgatgtaatgaatgaagaatctttattcattctcccattaagccacatatactaatataagatgagccgtcggatttgaaaagaacggttagaaaacaaagagcatctggaggttctctcgcgccgctctcacgcgggcggctcgggagcgaaaccctagccgcccgtgctgccccctcccaacgcctccagccacctcgctgccgccggagcccgctaccggaaatcgtgcggccggccgggaaggcggcggcagggaaaacgtgccggcggcggagcaccccctcggcgtgggaggcggtacgacgcacgcacggcggaaggcggcggacggagcggccggcggggcggatccggtcgcgccggacacggattcggcctccccggtggaggatctggccccctgccggccagatcgggagaggggtggcggcagcgcggcaagacggcgggcggcctcgagctcgcggcgacggcgacgcggcaagtcggcgggcggcccgagctcgcggcgacagcggcgctgcaagatggtgggcggcctcaagctcccgacgacggcggcgcggcaagacggcgggcgacctcgtgcttgcgcgcgacggcggcgcgacctcgagctcgcggcagcgggggcgcgactcggcggaacagctcgcggcggcggcggccgcgacggcgcggcaacgcggctcggaggagcaacccggtcggcacgcagcggaggctgaccggccaaacggctgttggtgacggcggcgacggtcgtgcccgccgtggtgctcgtggcagtttgcggcggtgtcggctagcaacggtggtgtcgggctggctacttggtggcagaggacgacggcgcagcggtttgcggaggcggaggctggcatcggtagcagcggtgacggcggccgtggctgtggacggtggcgacgtcagcggatgcgggttgctagcgaggtggctgggcgttcggcagcagcggctgcggtggcggtgactgtgtctgcggtcaccggaggcatggcggacttggatggctagccgagggcgtggcagacggctgcttttggccggtgtggcgtcgtttggtggaggggtcggagaccggcttggcgcagagaggcgcagccgatggcagtggaggccggcttggcgcgagaggtgcggccgatggagggaggaggaggccggaatggcgcgagaggcgcatccggtggaggaggccggtttggcgcgagtggtgcggccggcggtggaggaggcgacctaggtgtgaggaggagctgccggtgagagtggcgcagtcttcggcgcacgaaggctggccggcgggggacgccggtgcaggggttccacatgttggcagagcttgtgtggtggtggagcatcgatgtgtcagccgtggattcgcagggtgagcggcgggtgaaaacctagtctggcctcggccggaccgacaacgatggttcattccccctcctgagggcattgtcgtgttgtctcacccctcaagggtggttgccgggcgaaagcccggtcttggctcctttgagcttcgacggacggcgccagcggtttttctatcgcttctcttcttaaagacgtcgttttggcatcccctagggggggcgatctcgtctgtgtcgctttgttggtctagtggtgatcggtcatgcttagcggcggccgttccggtgctagccttctcctggacttgtgtgttggcgatgtcggtgtgttggtggtggtttttttccttttttctggttacgaccctttagggttgtaatcttataattttttcttgctttatcaatagaacttcgcaccgtctcgtgtgagtcgttaaaaaaaaagaacggttagatgaatgtatagagagaagagaaggggaagagttaggattcaggagacttccatcggaaggatctagaaaatgatatgggagttttattaaaaaaagatacttctatgcagtaaaatgggaaaaatgggaatatttgtgaagcaaatacatgaatggacctacagccctactgatggacctctgtagagactagaaatggactttctatgtaaaatttatttatgcaatattagatcggctaaattttaacactattattactaatggcacataatggtgttacacgtagaaaaagacaggtcatcgtcgcgcgaatgcgctacttgatagctagtactagtagtgactagtgagcaaccaagttacaggcagacaaactgtgggaggcaaaaatattcgaacttcgagtttcggtaccacatgactctcgaggcctttgtctcaccaactaaggctgtgttcgtttggacgttttccagcgcgctacagtgttttgcccccgcgcacgcttttcaaactactacacggtgtacttttttgcaaaaagtttctatacaaaagttgcttaaaaaaatcaaattaatccatttttgaaaaaaaaattagctaatacttaattaatcacgtgttaataaaccgttccgttttccgtgttactgtagtgcgctgggaaaacgtccaaacgaacacagcctaaatccaaagtcaatgccatatggacctatcaagtactatttctgcaatgcagtcacctaatcaagcccaatcactaaaatcactgttgcagcagaggcaagacacacatggctgatggcaattccctctcatcatcacaaaaagccagatttggcgcgcttaatgagctccacttgggtgccaaatccccatcaagcaacacggccgcgttgactgacctgacctaacctccccgcgcggatcccgtcacccgctcggtggcgcgaaccacacgccgctcctgcggatttggcgcgaaacgaggccgaaattttgtccacgtggccagcggtgaccgcaccaccccccccctttcccgcgccacgtcgcccgccagaacgagcgtggaccaggtcacggacagcgacgcacaactcccggtctacgtggaccgcgcgtgagatactcagatgggaggggtcgtggcgttggtggaccgggtgcatggaagtcgggggggatgacgtggggttgaccccgcgatttgttcgcgctactcagtggctgggcttcccgcgattcagcttcaaaagagcgcaccacatgagtcacctaacaaaatgaagactcgggtcacttgtgttgacatggtaatggtatgccatatatatttgccatgtcagtggcaatgattgatgatctggtgggctatgtctatagaattggatttcgattattatgttaccgtcacatgtcaccatgttgtgagtaactatcataagtaacaaatacgattattagttattttagttttaattgacacacacacacatatatatttatatatatatatatatattattttcttaaaatatacaaataatatataaatcctatttttatcgtgaaatccgataaaaaaacatttactcatttaagcacaatttattatcaagatgtacgagaaaagagttgtgaatcacggctgatctagcaatgcgtctttcttgtcatcaccataattttgtatggaggcattacgccgcgtaccgaacgccccttccaaacgatttataacaacgacgagaaaaataatgtcgactatcactaacacctaatgacattcatttaaaaaatacaacataagtgtacattgggttcttaccttttagtgggagaaaatttattagcacattcaagatgcacaagaatagagctatgaaacatgactgacttggcaatacgtattcctcatcttcaccataataccgtgtaggcgcattacgctgcacacgcgtcacatccttacacatccatattacacataaaaacgacacgtaaataatatccaccaaccttacaccaatagtactattattcatccaaacaatattgaatgtacaaaggttcctcacgggcaaaaatttatcagcgcatacagggttacacgagaatagagccgtgaaccacgaccgacgtggcaatgcgcattccccgtcaccaccacaatctcgtgttcgtgtggaggcattacgccgcgcacgaggcgcgcacgcccccgcccatatgaatcgcgtatatgaggagagagcgacaatgccacaagcccaacccaattcatccccaagtccaccaccacacacacacacacacgcacaccactcctctccccacaacccatccactcccacgccgccgccgccgcccggatcgccgcgagatggagcaggtgagcacccctcgacctccgcgatgacgatgccctttgctgtatccgatccatccgcgagcgtggaggaaatggtcgctgctgctgctgctgatgatgagtgtgtttgtgtgtggctggaggagcagtacgagaaggtggagaagatcggggaggggacgtacggggtggtgtacaagggcaagcaccggcataccaacgagacgatcgcgctcaagaagatccgcctggagcaggaggacgagggcgtcccctccaccgccatccgcgagatctcgctgctcaaggagatgcagcatcgcaacatcgtcaggtgacccacctcctccctccctgctagctccatctctctctgcggctgttggttgggtgggtgggtggattgatggattgcgtgatttgcgatttgtgaatgctttgggaatttggattgtgccgtgcaggctgcaggacgtcgtgcacaaggagaaatgcatatacctcgtcttcgagtacctcgaccttgacctcaagaagcacatggactcatccccggatttcaagaaccaccgcatagtcaaagtaagatgttgaaactaacatcctcttttcattgatgcaagtatcacgccatttagtgatagtaacttcgctgaaagtgtgggatgagctagccattgcttccattttgtgcatggtttatgttgaaacgggaaatgtgatgctgtcctttgcgcctgtgtgcagtcgttcctctaccagattctccggggcattgcgtactgccactcgcaccgtgttctccaccgagatttgaagccccagaacctgctgatagatcggcgtaccaactcattgaagctcgcggactttgggttggccagggcatttggcattcctgtccggacatttactcacgaggtacattttacagcccgacacgtttttcgtttggtacactgtgatttatagtccttgcacatcacactacagaagaggggaactgtctaatggtgaaaacgtgcagttaatttagatgagtacatcaaaaaattaactttgcctccttcactgcaatgcattttgtaggtgctctattaagtaggccacatgtgtactctttttgctacatgttgtgctactgtctgtttcattgaatatcacgcatgtattcacggagatatggtacaaattgtggactatgaccctatgtcatggctgccaactgaagattaatgtcacccattagtgctcactgtttttatggtacatcttaagactgcttgtatctctcttccctctactgccttttataactgttaagaatcaatggtagataattttccaagcctactgtcatagtgcttctttgtcagtttgaattttactctcatggcaatatctggtgaaacctataaaccagcacaaatacctggacctttttctgtactgtacaccatccatttctacctaactacctttacgacaactcctgcaaaaagaaaaaaaaaagcaattgatgaacttagaaaggtggactacgaaaatgaatgcatgcatacagaacataggcatttgtaagaaccgaattagttaaccagaataggtacagagcaatttctacatctcctgaatctggaatgctgcacacgtagtttaaactgttgttaatctagataatggagaacaaaatgagaacccctctgtcttaaggcaaacctagagccaggtttgactggagcaggcataagtatcaacgaggtcttcttgtgatatacaccttttgcccctccatgtttacatcatttcatctttaacataacccactttggtttgttaggtggtgacattgtggtatagagcacctgaaattcttcttggtgcaaggcattattccacccctgttgacatgtggtcagttggttgcatttttgctgaaatggtgaatcagaagccactatttcctggagattctgagattgatgaactctttaagattttcaggtcttaattttcaaatgttattaagtcttcatgttcttccatgtttctgaacaaagacaggaagacctaacactgctctatacattttcatgtgttcatgtcaatgaagtattatgggcactccaaatgaagaaacttggccaggtgttgcttcactacctgactacatatcaactttcccaaagtggccatctgtggtaaatcatgaatgacttttgttattactcttaaaaattaatatagtttgaatatgtggatagaggcaaaaataaaatcatgcactgtgatccttgcaatcacgttatgacagtgcaccattttttttattgggatgctggatgtttttggttctaacatagtgtccatgttgcaggatcttgcaaccgtggtcccaacacttgattcttcaggactcgatcttctctctgtaagtgacctgtgaatatttttggattcgattatgcaactcatgttatcatatgatttccctagagacagtccattgtttgtgttctatatattcagctgttgatatttgagttgcttagtgaattcttgggattttataccagggttctataattgagttcccaaattaattcaggcacacaaatgtacccgtttgttttctttagtacatacctccatgctgtgtaagcagtatagtagatagcgggcgcagcttgattgtcaggatgtagccatgtattcatttctcttgtaatgttggtcctggtgcactttgttagttgtatgtaggcaagggaatcctctagtatagatattgcagtttctccatcctcattatatggctgtatcgccatctacattgaacatcaaacagaagattgcatagcttgttgtatgaatgttagaagtcttgcatttgggctgcaatctgcgtatgaatttattattttttttaaataaagttgtatgaagcactatattccaaatctatcagtgacattattttcttggcatcctttaattgtcagttgatatgcatccatagccttgctgactgctatgtttgcctcatgcagaaaatgctccgtttagatccaagcaaaagaatcaatgcccgtgctgccctcgagcacgagtacttcaaggacctggaagtggcgtagattatgcctcatcttgtccatttgtaaattaagattgcattgtttgctcagccgagttcttttttggctttccttaatctaagttggtgtgctcctcccccaactctatttttgcccttttggttgtgtagagatgagaacagaaggtacctcctggctatccctctgtgtaattcaagccaattgaaagatccttattgcgggagctctacattgcaattttgctctcttgcctatatccagttccaggactgctgggattttaagctgccaatgtggcatggacttctccagtcattcaaccagttaatttaaactcttttgccaacattttccaactgatgtgacaatgtttcctttatctgctgtaaggatttcgacacatctttagttagtcacagccgtaaccagtcagtggtaaggcgaatactgcaaatgattgggccgaacatactgatcatgtgcaaatggaacacatccacgtctccgttcttttcttcttctttttttgcgaggagtctacgttcttttctgagaaatccctgcatccacactggtcatacgaatcaagctgacagcttcgtcaacgaagcacgtgtgctatcattcatattattttccagtctaaccttccaacgaatgaaagaagcttcattcattgacgaagctggacaagtatgcattcattgacgaaggcacgaagctggacaaagtatgcaagtagagcgagaaacacatagggttatttcggctagctccacaaggtgatagacgatctgggttcgaaacctcatctcttctaattatttgatattagtttcttccataatattagctttttaagtatgcaagcagagcaacgagcctacgagaggcagagttagctagtatcacttggaataggcttccaattgccatcatctcaatcttggaattcaagctcatgggaatggaccattggagacagaaagaaaatttactactgcatttgacctcacacttgtatgctgctatggattaatggatgggaggaccaatggcaatgaatctgtgttgtatgcaagcgatgggcgatgttcttgtccaggcattgcagtagaaatgcaagagcaagattcaacaggagtgagttaatatgcaagatttaatggtgtcctcaagaagcagcgaaaacagttggacactactgttgcaggtgtagcgcagggtaaaacataagtgaggcacaggtaccgtgtgcaatggcactatggcagcagtgtcacgaaaaggacgagacggcgtttgatctggatatttcataggaatatttaaccttttgccactttttcggacaggtgagctgcaaaggatttaccacttcgtgagaggaattaaacttgtttggtgtaaaggataattgacaaaaagacaatttcatatatcaaacacatactatcttctcttgatcaatgtagtagtacaaaataataaaggataaaaagacaaacagcacagtatccttgcatacgtatagttgaaaatccttttgtccggggatttaggttcccaacccttttcacgtgcacgcttttcaaactaataaacggtgtatttttttacaaaaagtttctatacgaaagttgcttaaaaaatcatattgatctatttttgaaaaaaatagttaatagctaattaatcacgcattaatagaccactttgttttccgtacgcactattccagttggaaactcagccagccgaacacaaccaatattatacgctaggtttgagtacagcattcctcgtcattgatctgttgattgaaagatctcacatggaaaattggctcttccggtttgaagaaaaagtaaaagatttggatttctaaggattatttctactaatatcatttgttctgtaggaatgaagtataaaaaaacaaaatgaatcttttttttctataaagttgtaaagagacacgaaaaacggagcaatagattaatgcgtgattaattaattattagcttaaaaaacttcaaaaatgtattaatataatttttaaagtaactcttctatagattttttttttgcaaaacacgtaatgtttagaagtttgaaaagtgtgcgcgcagtaaataagagagtgaggttggggacttgaactcaagaacacaaatctcttgaaaaaaaatcctttggattgatacgtgcatacatttctaatcctctttttttttctattcatatgaattgaaattcctctaaaccaaataaacgctaaatttagactcactcgatgataaaaaaagggtaaattggaaccatgccattataattttgcaaagtttaagatataccattggtatctcaatgacatgtaggacccacatgagtcaatgatatgtgggtcagtatagcatatctcaaattttctaaaattataatggtatggttccaattttccctaaaaaaattatgctcgttccgttctacagagtaaaatataacaccatacttggctgctgggttgggttggagtagctacgaatccagaccacagtaaaaaaacggaccggaggtcgacccgctctggtcgtcggttcaccggtttactggtcgaaccgccggttatttatttattaatattatatttaatttgcattattttaaatatagtaccatcataaattggtgaaaatatgcacgaagaaactagtatatctattattatataatatggtcacaatgtcaaaaaaaaatgtagtatgataacataataaattcataacgcatacggctatgacaaattaaaaaccggttcaattcttaaaataaccactaccaattcactggttcccatgaaaacggcccggttcatttttttttacttgttcgattgaaagggcggtctttttgttgaaacgagcctttggtttttttccggtgcaccgccggtccggtcggttttttttactatgatccagacaggatatttccaatcgctgacgaggtgggccccacctgccaggggagcaaccaaagccgccacgcgcccacgctgccgcgacggggaggcggaggagagctcgcatcgcaccaagtaggagtatattacaacgacggcttctacgaagaaaaccaatcctccccgatagccgaagccgaagccgaagccgccctgctctgacacctcgattcaccccgcctcgccgccggccaccgccgccgcagatcaggcggctccagcgggcggtagggctcctcctgtaggaggagttggtgggtaccgtcgcgttcttctttcccctagctaggtctcgccagaaggaggaggaggcggtggctgcggcgcggtcgccatggaggcatacaagctctgggtgcgcaagaaccgggacctcgtccgctccctcgagtcgttggccaatgtaaaccgtaacctctgatccccaatcgaatcgactgtttccttttgtttggggggggggggggggggtctggagcttcgggagttcgtgatccgtagttcgttgtgtggagctcgtcgatccggagggagctcttgttgggggtttgtagggggggtgtgggttttggttggaatcgactgaattggggcgccgtggtggctgactgggagttggagctggggccagctgggttttgggcgaattcgtgtggtttgtgctgtctcttgtcgagcacaacatgagagggttaattcaacttcgttattttcctgcaaattttcatcttgattcaatgattctattccagtgtcatggaatttggttagaggggtgcagatttattgtaataacattacttgaatcgtaccaggatatcactcatctgaagtatttttatcaggggctaacgtggatacttcctgagcgctttgccaactctgagatcgcaccagaagcaggttcggtaaatgatcttttagtagaagtaacatttagcatcactacatcactatttgatatgcttgctgctttgtcttgtgcttcacctttgagccacactaacgtgttatatttgcaagcgcaaaacgctatttccatatcatgtgttattcagatgaaaaatagggtacaagtatcttggcatggtaactggtatttttggatgctagaaagtatagtatattggaataaatattatctaagatgtagacgttgtatatctaatgagttttgagatgatggatactcaaatgtcagtttgggcgttatgttttgacatgtgatgcacagtggccattaccacatgatgcatgtgactgaatattgatatgcccatggttccatcgccaagtactgttctctagaatgatatctagttacacataattttccaactttgtattgtgtctgggtgttagcataactgcttcttgtttgtatgtttgtgtaaccactctcctaggtcttggataacacatgccgtgaagctggaagaaatcattagccttttgtggatcaggcaaagattgtgatcaatatcgttgacacaaaaatactccattatatgttgcttctgaccatcttctagtcgttgaacattgttaactatttagtgctaatacaatcactgcttactagatttggccttttgtgtcatatagaggaaacaaacatggttcttactatcatctcgttatttatttatgcaaattattaagtatacgaccttgtattaagtaaaaaagctggacacctgttccttgtatacggccttgtagacaaattcttataacaataacactgaaaaaaccttgagttataccgaaaggatatgtaagtgttttgccgatactattataattttctttgcatcacaaggtgacagtcttcagccacaaaatcttgagtatgttcacattctgaaaagatatgtaactgttttgacgatactattctccggcgaacttgtattgttaaatgcactggcagtaaaactattcattgctaacttaggaatatgagtaccttccagttttgttattattccaaatcaaaccattatagggcctagctctttaattttgctaaggttttcccaaggatactttatgctgtacgaaacaaatcaacacttgttcactttgcaaacacatgatagattgttcttgggcactgttttcttctcttacttaaatgatgtattttgagtgttacaggcttgatcatttcacattaagacatcttttttttcctgaacagtatatgcatttctgggtatcgtgagttctgtcaatcagcacataattgaaacgccaactgatggtcagacattggcctccaaagagcaatctatcccatggtcccttgttgtctcagtacttaaggatattgaggcagttgttgaggtggctgcccagcactttgttggagatgatcgcaaatggagctttcttgctgttacagaagctgtgaagtaagatgataacttacgtatcattttcttggttgcataactcataactagtctgcgtttcaggcattgctcagaaaaatgataatggttgtgcaacatttcagagcaggtgtcaggttagctgctttcggggagagtggctacaagatgctcttacaaggaggagaggtggcaaatgaagaggagattaatattcttgatgaaaattttggagccaaaagtaatggagtaccagtcatttatccgatgaatggccatttccaaaatggtcatggggttgcatctaatggtcttgatggaaaggctggatttgtatcaaagagtctggagggaagagctgtagctgctcttaacaagtttggccagaatgcaaagatgacgtcagatcccatgtggatgaagaaggctctgcctcctcctgatcctcctggtaaaataatgattccctattggagtgtcatgtgtcgtgatctttgcatcgtattaccatttgaatcatgtatctctatgagtctattcacacagcgagttatttgttgtctgctgtgcagcgatggtggttgagaagccaactttggcaagtatttggtctgctaaaggaatttcagggcggttatttttgttaggagaagttgtccacatattcagaccactgctatacgtacttttgatcaaaaaatttggaatcaaatcatggaccccatggttagtgtcattagctgtggagatcacaagtcttggcatccattcacgtgcaactgatcttcatcaaagagggggaaaagttcatcagctctcatctgctgagagggacgaggcaagattattttagttttctaccttgttcaattttgtttgatcattttttctcttcttctgagttatctttttcttcattggttcaatttcatcagttgaaaaggcgaaagatgatgtgggccctttatgtcatgagagatccattctttaccagatacaccaagtaatgatctatgaaaccttatgataatagttgagtggtttgattttccgttttcttcccctgctcttacacttctttgatgacaggcgccatctccagaaggctgagaaagtgttggatccagtgcctcttattggtttccttacaggtacacgcaccttctccacatctataaaattcttccctacataaattcaaggaggaaacattttgtaacataagctctgcatgctcaattcattgcaggcaaactcgtagagctagtggagggggctcagacacgatatacatacacatcgggctcataaggataatggacaagcaggcagatgtcatgtctgagagtttccttaacgatttgccatgattaaccttttgtggttcatgtgatctggttgatgggttttgttttgagcttgatcctaatcctatctgtacatgccatttccttagcaagatttggcattcctacctgatgtcttggggctgcaaagctgttgcggccactgtaaactctcctctctcctctggtggcagctcagctgagaatctaactatactatagtatatcggtgtaatattaagaataggcacatcatccctgcaacgataccgtgtatttatttaccaattaccatgcaggacatactggaacccagaacaagtccaagagaaaattgcttgggtttttcatgattctgttgattctgtgttgcaatctagtgtcgatgcttgtgctctgtgctatgtaatagtaacatgtttgtatgatgtccactttgcccagctcgatcgccattgatggccattaggccatatgggttcgtattccgtagagaaacggtatgcatagcagatgaaaatgaaaaatgacacgcgtacaaaaacttgcttacaaacatcgtaaaatttgatatggcctgctgtaaccaaatattgtttttttatgattacccattaattaaatctaacggttgagattttgttttttaagttttttgtaaagatttttttaaatacgtatagcatttactcagagcaaatatttcacttgaaatattgctaagatcctctgtttgaaacacactttccttgttccaaaataaattatcctattaatatgaatctacacagacatactaaatatacgatgatatgatgatattctacattaagttaatttattttgggacgaaagtattattactctttcaaatgcaattcggatcaggacaaggagtaaggtggcccaaatttgatgggaccggcccatattgcgatgcaccgccataggcccaatcttcttaaggcccaacttaggaacctaatcccccacttcctccatcgcaggagaagccagcgagtacacaactcccgcgccgccgccgccgtcctcctctcttcctctcttctcccccgccgccgcgcctcccggaccacgctcctctccgctccctcccgcgtcgaggtgacctcccttcccctctctcccccccccaatctctcgaaggtgcagtcctgcgctgagctcggatcggtagtgtctagggctccgcccccgcttctagcgcgattagtccgggtgttttccgccccattggctggatgtagagctcggatctagatttatgttttctgatttcgccggtagattcttgtgttcgattcgggacccctgacgctcggtctccctggcaggttgatgcgatttttttaaaaattttttactatatacttgatttagctcttttcaccgatccatgccacgattcggtggtattttgccccttcgcgtttcgatatgtgaatgcttctcgatttagggtaaatttgttctgtatgaatttatacctttatgttttagcttatgagtttggtttctgttcatacaccttttctattttcaagttaaggccaattatatttttgtatcattttcttgattataactgttgcccaatttatagaatcagcagagcttgtagccatctgaaggaaaagaccaagcagcagccatggcatctcgtttctggggacaggtaatcgcctttccgtttgtactggcagtgattcttctttgtatcaatattgcagtaacagatatgaacccttttatcattggttacaataatttaatactcttgcatggatctactcaacttcagggagacagcgactctgaggaggaggagcaggagattgagtcagaagcaggaagtgaaagtgaagatgaaggcggtgatgccgggggccgttctggcaaccagaaccgctatttgaggactactaatgcgagtgacagtgacgagtccgattctggtcagcgtgtggttcgctctttgaaggataagcgcaatgaagagttgaaaattaccgttgatcagatgcgcaatgcaatgaagatcaatgactgggtgaacttacaagagagtttcgagaagctcaacaagcagcttgagaaggtggttcgtgtcaatgaatcctccacagttccaaatatgtatatcaaggctcttgtattactggaggacttccttgctgaagcacttgcaaataaagaggccaagaagaagatgagcagcagcaatgcaaaggcactcaatgcaatgaaacaaaaactaaagaagaacaacaagcagtatgagaatctgatccaggaatgcagagagcatccagagcgttttgaggatgatgatgtggaagacaaggatgatgatgatgagacagaggatgaggatagtgatgcagaggaggatcctgaaaagatagcaatgtctgaatcagatgaaggagatgatgatgaggaggatgaccaggatggtggagactgggtaaggcatacgaataagaaagataagcttatggacaagcagtttctgaaagaccccagtgaaattacatgggatattgttgataaaaagctcaaagagattgtggcatcaaggggtaaaaagggcacggggagggttgagcgtgttgagcagctaacctttttaacccgtgtggcaaaaacacctgctcagaagcttgaaattctctttcatgtgatttctgcccaatttgatgtgaaccctagcttacttggtcacatgccagtcaacatgtggaagaagtgtgttaataacatgcttcttgtgcttgatatactgcaacagtatcctaatattgtagtagacacctcagtggagcctgatgagaaggaaactcagaagggtgctgactatgatggaaaaatccatgtgacgggtgacctggttgcgttcctagagagacttgattctgaattttttaagagtttgcagtgcactgatccatatacgaaagattatgttcagaggctcagggatgaacctttgtttctggttgttgcacagaatgtccaagattacctggaacatgttggtaactttaaggctgaagctaaggttgcactgcgtcgtgttgaattggtatactacaaacctcaagaagtatacgattcaatgagaaagctggcagagcaggatgaagatagtagggaggatgaagacgcagaggctgatgaggagcgtcaagtatctgataacaataggggccctccgccgtttgttgtgatccctgaggtcgtgcctaggaagcctactttcccagagagtggcagagctttgatggatgcattgatgtctgtgatttacaagtatggagatgaaaggaccaaagcccgggcaatgctgtgtgacatttatcaccatgctatctctgatgaattttctgttgctcgtgacttgcttttaatgagccatttgcaagatggggttcaactcatggacatatcgtcacagatattgttcaacagagtcatggcccagctggggctgtgtgcttttagggctggtttgataatcgaagcgcatggttgcttgtctgagttatattcaactgggagagtgaaggagttgcttgcacaaggtgtccaacaaagccgataccatgagaaaactcctgaacaggtttacttctgaactccctgcaatatgcactgcttttttcccatgtaaatttacctgcacacatgtcaattctcctcacaaaactattgttttgttggaaagaggtcaatgtgaattacatctggcactgcaattactaatcagttgactgtattctaacatagttatgttcttgcatttcctacatcttttgatttattattgttattatcatatttgttttttttaaggatagccacatactgattttagcattaaatgctttgattgctctatcacttataaagttataatgttagtgtctccatcattatctgcctttttattttgtttatctagacctagaaatttcattacatatgctgaggctcatcgcagagctgatcttattctactaggaataatacttcaacagtaatctaaagaggtaccacacatcttctgtacttttttttatcataagtgctaatattgtaattgctctaattcctgcaggaaaggcttgagagaagaaggcagatgccttaccatatgcatataaaccttgaacttttggaagccacacacttgatttgcgccatgctgattgaggtccccaatatggcagccagtacttacgataagaggaagtttatgaacagaacattccgcaggcttcttgaaatcagtgagaggcaaacttttgtcgggccaccagaaaatgtgagggaccatgtaatggctgcgacaagggccctcagcaagggtgaccaccagaaggctttcgatgtcattaattcgctggagatctggaagcttttgaggaacaaggagcatgttcttgagatgctgaaactcaagatcaaagaagaagctcttagaacctatctcttttcatactcttcttgttaccagtccctgagccttgaccagctcacgacaatgtttgaccttagtgagcaacaagcgcacagcattgttagcaagatgatgatgcatgaggagcttcatgccagctgggatcaacctaccaagtgcatcattttccacaacgttgatcaaactagacttcagggactactcttccagatggctgataagctctcagtccttgtggagagcaatgagagggcatacgaggctaaaactggtggtacctttgagggagcaccacccaggcgtaggggtgatgctcaggactcatccaacttgggcaagtggcaggagaacttcgtatcatcacaagggcggcaaggcggcgggaggtccggatactctggcagaggtggaggctctggaagaggtggtggtggctaccagagggacaggggcagtcagggttctcgtggaggctatggtggtggttcacgcttccaggatggtggaagatctcgcactggttcgatggcgaagggaggaggtgatggcggtgcacgcatggtgagcctgaacagggctggtagaggttagagaactagttctccaggatagtattcagcgcaaagttttgcaagttctgaagcaccaatcaagtttctggcattttggaagtcgcatctgttctaaacctggtcttgtttcttaatttcgttgcagcttacagtttaaaacattaaatttgtcgaacacttggacaaagagctctctggtttgtaccatgggagtgaggattatgtattcgctcctatattggttatcatgctggcactattttctgctgttattgtactgctttatgctaaatttaccttgtttatctatgcgcatgtgtgattcattaatctgttggaaattacgtgttgatcggaaccgatgtaatgttgaaaaattatgattgcgtttgttaaaatgcaatgagcgatggatccttttggtattaagttgttgaagataaacctgaagacgatccatggctgaacgcctgaaccaatattgtgatttccggaaggagtatcaaggttgtgttatttggaacactaacccaattttactctcatgtactgttgtttttgcctaatagttacatcacttgatgcgttgatgtttaactttggccatttatccaaacaatatttacaaggaaaaaagaattctcgttgcattgtacttagaatctgagatgctgctcctgtattgctgtctgtaattgcatacattttctggcagaaatttcacctctggtgatcgatgacaagaatgcccgtcattgtgtatgtgctcaagatgttggtttccctgtgtatcagcttcatggcatttgagttagctcagatactatgcttttggagggtagagatgtgaattatgaatatatgagattgtctgaaatgtaaaattatgaatttatgagattgtcagaaatgttggtgtgtgtctcatgttatcaaatcagatagtgaatgagtgattgcatctctaatcttccattctactctataccattgtagtggcagtgtacatacaatactagtatgacttctgaaaaaaaaaaaagaagcatagcacacaaggcaagctgatatcacaaccttgccatagttctgttcaggtttagttcatcgcttcctacattatcgagagatttatgacgggtagcttgtgagcttatgtaggagagggactgcaaccaagagacaagtaccggcttccgtgtgacatcatcagattctgcaacatgagcatgcatgtcgtcaaggagcacatcctgaccttccttcggtagcagactgacgaattccgccagctccttcagcagataagggaatgactgcagagagggcaaaagagggtgttagtagtgcatggtatctgcaacttcaaaggcttatgcactctcaagactcaagagatgaaaaacattggaattgaatgatagcctcaataaagccggttgaaacatagctaccgagtatggaacacagtggttcgcgagtcattcaatcaccaaagatacagattttcctagctagtgaagtttgtaatgtgacaaataaatttgtttgtgattccatgattctgcagtaaaattatcgtcctagaaactaagtaccatcctgaatacaaccatggaacaacacatgaatattccagaaaataaatactactctacacatgaacaaaatattggtcaagagagagatcttacctgaatatccacgaggaagatgagccgcagcaacaggtctaatattttcttacaaggttctgtgctaccttcccatgacctccacaaggatttgtcctctaccattgaggtatggcaaagatctttagccttgacaacaaggttatggatacagaaaagagtggctggactcccagcaggaagatgtcgggcgagtgctgcaactcctgatgctaatccttcaaagggagttaccccaggataggcctattaagttaaaagaaaatagccaactaaattagtcttccagatagaaatcaaatatgggaatagtagccaatgagttacctccaaagttctcttgatatagtaaaaagcaagttgttctttcaaagccattcgatcatccggatcagtatcattgccggatgacaagaaagataccaccactgagtgtgaggcacgtgttactttctcatttgaatgctgtatgtatctgacaattttatgataaggacactttttcttaatatcgaaaatctagatagccaagaacaaattaaatatcaagacaaaaaataacaaactgcagtttgaaaggatacaagaacatgatcgaagctaacttgtcctgaatcatgtgggctggaatgaggctaatgcaagttggtataacccgcagataaaacaatatgcgtgatgtctgaaccacatctccgtgccagatatatcttgttccatccaaggttaataaatctacaatatgccaaaaaaaggaccttaatgaacagtatcagaatcagaacggtaaaatgagacaaatgggaattaaaaaatcaacctggtttacttgtcaattcagcataagaaggaattgactcaatgaacaaagcagcaactgccgcattttcctgattgacaagaacagcacgccggactgcctcagtgtactcaggaaggcgcaagcgtcgcagatgttccaaacaagagaaggacaccaagatcttaacagcaacatctggttggaatccctctgaggacttagcattcaacctgtgcttagtgacctcggctgaaaagactacaaccataaggaatgcagcctcggcgatcttctcaatatctgtgatcaaatcatcctgcttcccctgatgcaaaattactgctgcacgaagatgacaatacagcacttgtgcatattcccatacacacgtttcaacagaagttttagccttatcactggcaaatgaatactgattacagagaattccagcaacaggtccagcctccttgaaaagcacactatccagatgttgcttcacccgattcttgacaatttcaggtgaattcccatctggacattgcacagacatcttgagcaaatctggcagaggaagaagctcctccagtagcgccatacagacacaacgcaacactgactcatgaggagtgacctgcccacactgcgtcaagcccaatgcaacacattgaagaagtaaacgcctatcatcgacgtgtttcccttctaaaactgccttctcagctgcaaatcggatagtccgctcaggcgcctccttcaaccgtggatcaaaatccagccggtatctcgctgaagcaaccctcaatgccctcagggcaccacaagctaccatcaccaccggagacataacatagccctggctctgacacgactccggtgaaatcatctcgaatagaacctgaactttgcgcatcttcctcgactcaatgaagcccagcaacaaccactccaccagcttaagcatcctaacaccaacagacaggctcccgatcctcccgcaaatcgtaagcaaggatccaataattcttctaaactgcagctcatcagcagatgccaacacgcaaccaataccagcaagagccaggtgatcaagatcatggcagctctcgctccccttctccatgtcatcaagaatgcgagctacagccacaacaggatcgctatcatggccatcgccggactcgccgccgccgccgccgagattctctgctgctgtgctccccgaattggcatggctggagaggctcttagcactcctagaggaggcgagtgcgccgaggaggaggaggcgaggtgagacggggagagaggcggggagagacggcgggaggaggtgcgggctggtggcgagcagcggcgagacgaggcgcgggtggagcgggagcagcgggaggaggagcgcgacgtgggcggaggagaggcggagcgagcggcggtggaggtggagggtctccagggcggcgagggcgtcggcggcggcgggggaggtggggttgcggaggtgcgaccacgcggagaggatggtggtcggggcggggggtcgaggcggcgacggtggcgcgaaggtgccggactcgaggaggtcggcgagggccacggcggcggccggcggcggcgtcgccatggctgggcttggaattggattggagttttggggattaattgagaggagttgagactgacacgacgacgacggcgacgctgagagttcaggctcgcgacgacaaattcgaaccgaattctgctcggtttgtgaatagttttgaattttgaccaccaatctaatcggcttgtgaatgattttgtattttgaccaccagtctgcacgatttgtgaataattttgaattatgcactattttattttatttcgagggaatggacagtagctctgcctttcatatacgtactacttaataggtttacataaaaaggagaaaacggtatgcaattagcaatcctgcactgttctacgagacaatctacccaggtattccgtagttaattttctcttattctgaatacaaggtgcagtctggaagaattcttgtagattgtgttttagctagcagtttatgaagtaatttgctgaataagagtcgaatcgaatatgaaatttcatgatacttagcagggatgctaaaaatttattgattaggcgggctgcagaagcgcaaatacacgaaatatagatacaattcaagttcacactttttttttccctttgaataacaattcaagttcacacgatcccaacaacttcatccttcagcacaagaagtttcagttcagagaaaaatgattgcacaagaagctcccagggacagtagaaaagcccccattattgttcgtgctaaagactcataattcatcaagcaaacaggtcgattccccagaacttggcaggctggttggtgcggtacttccggtcgatggatctcatcttctccatgtcctcgtcggagatggcgaaatcgaagaccgcaaagttctcctgcaatctctcctccttggatgtcttggggatcaccactgtgttcctctgaagcccccaccggagcaccagctgcgccggtgtcttgccatatttctcagccagagactgcaccggcatagaagtaagctgagaaattactaccaggttttcacaatgtgacactgaaatgtgatgctatgcaaaaacagtggtgatggtttggaatgtcatatcatacaaccttgatgacagggtcgtcgaggcatgagacggacccaaaccactcagtattggcagtggagccacccagaggggtatgggcagtgactaagatcccatgcttctggcagaacttgacaagacagtcgcgctggaagtagggatgtgtctcgatttgattcactgcgggctttatcttagcataagccaaacaatctctggtaaggaatatgtcatagttgctgcatgaacaacaactcactggttagattcaagaagttgacttcctctgtcatgacagatgagcaaacagcagtatgaaaattgcaagatctacgatttctcccaaaattttttttgcaagatctacagctaccttttggttcttctgtatgtcgacagctcaagtgattgaaattatctcatagacctaggagctagtatccatagtggttactaaaaagaatgacattactatcggacaagaaaacctggattatcaagatggtgataataacaacgtacaaggaataaccaaatattgtaaggatgcttccagagattaaagaaactaatctatgattatagctagagaacaattggtaatattgatttacttcacctaatcccaatgctgcgaaccagtcccatggaaacaagatcctccatagcgtgccatgttgtctccaatgagatagtggtatcaatgtctagcacaccatcatcaccaagagcactagcagtcgtaccaactcctgtaaatgacagaaatgttcatattgtcagtaatccaatgaaaatgaatcaatgttcttccactatactagataaaacaagaacagagtctataccagtatgacgggtagctactgggaagtggataaggtagagatctagataatctagccgcaactttttcaagctatccttacatgcttcaaccacatgcccatgatctgagttccacaactacaaccaaaaaaaagatacagaaccttcaatcaaataacatataaatgtggagaaaagaatagcgcactagatgaaacaagggctaattaattgcctgatagtacacttgctaagtgaaaatcaggtgtaaaacaacatgatagtagttttgtagtttcattcagaacgacatcagggggtagctcccatagtcccaagtacaacagatgtgtgcaataacaattccaaagaaaggtaaagaaaatgcaatacatcatgagaaaaaaaaaggaattccataatgtaacactcatatttaggctaatcatgccaaccacctgtacgagtcgggggaattgggttcataacattgtactataccccttttctaatgaggcagtagaaactaaccagtaggtgaatatatatatatatttttcagcagtaagaaaaaagtagtatattcatggtttgaaaggaagacaattgtattgtccaatcttaataaccttggttgtgatgaaaagatcctccctcttgacaagtccagtttggaatgcctctgcaagtgcatccccaacttcagcctcgttttggtaatcagctgcaggaccagcaagcaagcacagttagcaaatcacctaaactaggcaaaatttcccaaaagacttggaaccatgattcataatccctatcaattactccagaatatatgattgaacccccaaaaaaagaaaaggaaaaggattcataaatccgctacctattcaagacaaacttcatagagtactcgctagaatgaacatgatatgtttacatctccaaacaacacgaggccaaaacgattgccaattttaacttccacagtgacgcacaagcacacaagcaaattattgcagattggcaattctggaaccgaccaactcgtagtcgtagcaactccggctcggctcgatcggagcaacaggcgggaggaggagaagggaagtgaagggaagctatggaggtcgctaggttgggggtggtgttgttcaataccggcgcagtcgaagtggcggtagccgatgcggagtgcggagtggatgaggtcgcggatggcgggggagtccatccgccacacgcccaaccccaccgacggcatcgtgtggccgctgctcagcgccagcgccgccggcactccgctcccctgcgccgccgccatcccgcgcctctgctctgctccgccgcctcgttggaatcggagacgagaagaagaagaagagtgcgtccttcttctgatgtgatgcactaccagtgagattctcgatgtgcctctcgtctccaagtagattggcatcttcacaagatagatagacactgtgatggccattgctgaggtgtgcaagaattttgtagatataataaccttatttcttgtatctaacatttcatcgttcgtattatttaaattttttttatgattagtatttttatggttattagatggtaaaagataaatattactttatgcatggtttatcttttttattttttcataaattttttaaataagatggatgatcaaacgttagacacagaaatccacaattgtacttaaaatgagacggatgagtatgtatttatttccttcactacaatcatttcttgtactccctccgtttcataatgtaaatcattctagtatttcccacattaatattgatgttaatgaatatatatatatatataatatatatatatatatatatatattcattaacatcaatattaatgtaggaaatgctagaatgacttacattgtgaaacggaggaagttggtatttatttcctccattacaaaatattttttgtaggtatttccgtgatagtacaaaatttgtaccacgatataagcaattctaatgtacatgaatccatgcatttccaatcgcaattgagacgactgagtatttactaaacagcttagaaatgcttatacggatagagtaaaagacatccattccaaatcaagagaaatttggggggcaatacagattgatttgaagttcttaaaaaataatagaaacctggttttgagtgaatttggggtgtgctggtgttgatatatgatttctgaaaggggattggttatacttatacatctgtgtacagcagtaatgcaaaagcaagcaatagaggagatacttgaatacattccatggagtaatattagtgtaaacaaattacaacggagtgaaatgctaaacgatgggattcatgccctccaaatttccagaggtgagaatggtattcacaaataaccagctaaaaatactgtcaacaaacatcaagctcataaagaaacaaagatcgcgctgattcatcgctgttgtaaaaagaaacatacaaaatctgactaaaaccctgttttcctcaaatacatctgatctctctccttttcttttcatgctgttaatgcacagcatgccctccctcagtgtcaaggacatgtcaaaatcttacattaggtttgtacagccttggtacatcaagcctcatggaatattttcttcgacatgccaaacacaagctaaacgaaatcgttgtgcatttctgctcacttgccgcgcttcaaatcaaacacaacgcacgcgtctgcggctgatttcatctgcactcgggaaagatacatgaatgttaagaaacaagtcattattaaagtagcactattattattgctagaatcatataaatgaacactctaaatgaagaatacaatgtattagcagttgatctagctacctaatgtaaaaatatatgagctaaccactgcattgacactttttctttacctctagatcagacctattattagtgtcataattacaactcaatacttgcagacatccaaatatcaagcgcctgcaactgcaagaaattttaaagttgttttcagcaatacctggataacattgatcacttgtttcaacgcccaaccaactagagttgaaatgaaaacaaagacagtgagaggactttgcttcagaaggtttccgcacacctgttacatacagaaataccatatattaaccactacaacaggactgttgattggataaggcaactgtggagatgatgtcttcttacattaagcaagcttgttgacttctcatcggcgaacagaaaaagaactatgtacagaacctgaattttggaaacttccttgttagaaggtgaaacatttaagagcagttcagtcagcagcgtaagggtgctggacatgatgagatggtaactcatcaactatatcaaatgcctattcagtgctacatgggcagatgtaagataggttcgttaggattgttttgagcacataaacacatcaattcatgcccatcgttcagctaaagtagtcaaaaaccatccagcacagcactcatgttgtgcatgcaaccaggcaaacacccatgtagatattgcaaaatatggattaatcatgtacctccgaagcaacacaacagaaggccatgaatggtcggtgtccataatataacttcagaagccaattgcctgtgtcttttacatccttgtggctagtcttacctgataggaacgaactaataaaaaaaaggcgccatcaagtagttagcaacatgtagaagtaactagagacgcataacaaaactatagagcataactcttgtctttgaacaaaaaaaatgcatcatgaaaaaaggcattctgtctttctgaacaacacgatagtaagtgataatattctgctccctttaataccttccggaagaggatgcacctactaggtgaagaaaactataaagtggcactaactgaaaaaatggttagaaaactaacctgtacatttgaaaccaatggcttgtaatatccaacccaagcaacatcaagaaaactaagccaggtctgcaaagaacatgcaaatacaatttgtatcaggtatctagatccaaggtacaacaattgaagtgttttctgctgtcacttacctgtaaaactgggagagaagtgccaacaaacaggcagtgctaaccctgaggaaaagcaatgtgaacagtgaattatttcaggatgcagaatgtattcaccctgcatattcaatgaatgattcgaggagtacctatctgttaccatgtccagcacagctccaaatgttgatgctgatacatagaatggcattaactgatcagataatgagtgaggataaaccaagatttaactgttgagcagtatttcaacaatagctttttagaagttcatcctataatttactcttcattgaataactagtgctacaaagtctcaaggcagaaggcaaaagaaatagaaataatattttctgcagaaggacaaaatatgactttgaacacataaggaacacttattagttattaccttggttaaactttcgtgcaaaccaaccatccaagccatcgcagaaaaagctgatagattctgatgatgttaaatttccagagatacaacaaattgccaagtagtctggataaatttataacactcacctgaagaagtataggatagcaaagagcaccctattggaataacatacggcaaaagcaatgaagtttatgatgatcctaaaatatcctgcattaaagcaagatgccgaacagtttgtaagaatttttttccatcacctctattcaaccatatgtattctgttacgctatttccaaatattgtgtttctagttctcctgggttggtattattacaaaaataaaattttcccagtacatttagtaacaatagcatagtgtattaaacaagaaatcgtacagaagctcaccaatgatattagggatgtaaagatagactgacggcgtcttcttagaagaaggttgtgccattggagatcagtagttattacttgctagaagcctgaaagcttctcccttaaattgtagtcctatataggaattcctgtaaaataattgcatcagtttatagactagtccaaataataatgtcacagtgcaacaagcaacaaattttaaggaaacaaactagtaccataacaattgacatttatgacaaacacaagctctcgagcactagccttgaaaatcagagcaccaacagagggtgccttgcagatcactaacctactaactcacgacatcttttttcgacctaatgaaaagaaaaccctctaactaaattaaacaaccagaccaaatttccaattttccataggagcaaacccaacccaaccgcatatgttcccgaacccaaactactttgggtggcaaaacagcaagagccgcaagccctcaaaacccgctaacatcatcgattcccccccccctcgcagaattcctttggtgggcaacaaacaaaaagagggaagggcgccgcgcccgcgccaccttacctcacctcacgaaggggtcggggaggaagacctagccgtcgccgacgctagggcggccgcgccgccgcgccgcgattccggggagtcgccggagaggaggggggcgcggggatggatgcgtggaagcgagagccgagtcgccgccgccgccgatggattgattcgatttgtcgttcgattcgatgcttccttccttgtgcagatggatcgattcgatttcgatgctgctccacgtcacccgcacaggaaaaataaaaaggagacaaaaggaaaagggaaaagcggaaaaccgcgtcgtgggctggcggcaaagccgtggtcgagtcgatatcgtactgggccgaacaagggtcgagtcgatatcgtattgggccgaacgagggtaacgtactgttgaatgtcacttataggcctccatttcggcccttataaatgagcccaaattaagcatggtgacacgaaaaacgaacagggacactagaacgtcattaatcgattattatactaactattattattattattattactataaacttataaaaaatactttttaattttttaataaaaatttctatattgatttttaaaaagagtaccatttaacagtttggatatagtacatacttacggaaaatgagttagcatatttgagatattgagtagaatgtagcttaaggctgagttcgtaagagatggttgagaagctctttctccctacatgcaaaacataatggtgtattagtgcttctctccacgcacgcaaaatgtagcggtgtattagcgcataattaatgaagtactagcttaaaaaattcaaaaattagaataacatgatttttttaaagcacttttatatattttccttatttaaaaaacataccgtttaacaatttgagaattgtatgcacatgcggaaaaaaagtacttcatccattttataatataagacttttagtattgcctatatttatgtagatgttaataaatttagatatatattgctaacaaatcttatattataaaatagaagaagtagaagttttgaaaagtacacagcctaatgatgcatacaagagaccattggagtacgcaacaaacaggtccatcccgtgcttattagcggtagcggcggtcgtggatgaggtgagaaatatggacgtgcacgtgaaggaaccgatccccgccccgcccgtgatcgagttgaagctatagccattgcaagcggccgtaattagcgacgcaattacggccgcattgacagagttgaaaaatgcagagagagagagagagcagcagcagcaggatgagaggctgaattcacgcgcgcctcccgcccggcgaatcgacggaaatgcggcatccattcaggtaggcgggcggccggccggccggagaatggaatcaatgtcgtacgtacgccgccgtcgtcttcagataagagcaattaattaagcagccattatgttttgtcggatcgactagttgcattgacgactttcactctactacctagagttagatagagacaacagcatttgtatttgtggagataaaaacaagcggacacaaagaaaatgccctccaacgccaaagacaaatctcagtaaatcaagccgagaatgcatgctacggtttatctacacaccatgttgctttgccaatcactccatctttcttggatacgccagtaccacatgaagacttcaactataaaattaagtatatataggagtagtatagtatactttggggaggtattttcatccttaaaacaatactccctccgtcccataatataagaaattttggagggatgtgacactttatagcactatgaatctgacttctagattcatagtactatgaagtgtcacatctctccaaaatctcttctattatgggacagaaggagtatcttcttgtttttcatgtcatttcaaccatcattgtttttttttaaaaaaatgatatgataaatcagtatgaaatatgtcaaacattgaaaaaaaacattttctccttactcgtacaagttaagtttgaacttacatacttatgaatgaagtgatactacatataacaggttaatctctcttaatacttttataaataaattaattatgttttagtgctatgcataaaactgggatgtcctctgacaatcacctcctagccatgttcaattgctccgatgtgttttaatttgactcattgactgatacgaagcaatggctgcatataacacggtccctgctgcatctgcacataacgtggcttgcgcactggcactagcgcctaacgtaactgccacaactgtcagtcagcacaagttgaatcatccgtccgtgacccccgtggctgcacctgcatctgtacgtaatggttgaccacatgcatgcatgcatccaatccaccagctagtatctccatctaactaaaatataaaaatttataaccgaataaaacatattttagtagtattgatcaaaaagtgcttctatccatactcgtaatacaacgatatatcacattcaattataaatcatttttatatttaattttgaaacgatgtaagtagctaatgtatacatctgcccgtctcgtaacagacgtcacgtaattcttatatttttagataaggtaatagctaatgtacctgtcccataacagataccatatgattcttatattttggtacgagagtaagtagctaatgtaccagtccactaacagacgccactctccgttgcttatgctgttatgcatgcttcatgcttccaaccaacaaataactgccactaaccgctatatatatcgcatctcgcactgacactagctaaccaaccatgcatgttaattaactcgtgcacatacatacgccacgtactagcatctgtctgatctgccaccatgtccagggcttgcttgctcctcgtcgtcgccgccgtctgcctcgccggccgcgaggcggcggcgttcaactacgccgacgccctcgacaaggccatcctcttcttcgaggcgcagcgctccggcaagctgccgccggggcagcgcgtcgcgtggcgcgccgactccggcctctccgacggctccgccgacggcgtggacctcgccggcggctactacgacgccggcgacaacgtcaagttcggcctgcccatggcgttcacggtgaccatgctgtcgtggagcgtcatcgagttcggcgacatgatgccggcgcgccgctcgtcgttcctcggcggcatcttcggcggcggcggcgtcgcgcagctcgacaacgccagggccgccgtgcggtggggcgccgactacctgctcaaggcggcgacggcgacgccggacaccctgtacgtccaggtcgccgacccgtaccaggaccaccggtgctgggagcggccggaggacatggacacgccgcggagcgtgtacaaggtgacgccccagagccccggctccgacgtcgccggcgagaccgccgccgcgctcgccgccgcctccatcgtcttccgcgtctccgacccctcctactccgccaagctgctcgacgcagctcaactggtaggcacagacagctagctgtcacatactcacattcatcttgatttgattttaaatttgagaaactccccagagtcttccgctatggtggattagacgatctgggtagtctcaccccttctaattatttgatattaagtactttcttaatatttatgtctttttatttgattttaaatttgatttgattcttgtgttgtgcattggcgcgcatgcattgatgcatatgcaggtgtttgatttcgcggacaaatacaggggatcatacagcgactcgctgagctcagtggtgtgtccgttctactgctcccactcctaccatgtaagctacgcaacctgcagcacgcagccaccgataatttgttcctagtcttggaccttttctcttgtccctttactcttttcaatacatcacaatatgcactgcaattttgtcttactcatgcacgggcgatataccatccctaccaactttttttcaagtcttgtctgaatcgatcggccagtagaatgcagagcacacaccagtggacacatactgctccctgcacatatacagatttctctgaattttctgaattctgtcatagatctgtttcaattgaccaagatgatcggttgagagtgtagcacggctctacccctcccgctgtttggagtagagttacccgtcgtacgagtttttctttttctcccttgttttttatctttgttttcttccttccttggtataggtcggtctggctgattgcgttgtgtaacaaaaactctattcttctaatatattagtgtgcaatctttttatgcgcttgcgaaaaaattgaccaagatgatctgattggttgatcgaggtgtgatgtggatgcaggatgagctgctgtgggcggcgtcgtggctgcacctggcgtcgccggagaagaaggacgtgtacctgtcgtacatcgggtcgaacggccacgcactgggcgccgagcaggacgacttcaccttcagctgggacgacaagcgcgtcgccaccaaagtgctcctctccaaggcactttcagaaatcagattcatcgtttcgcttatgctaatgaatttacagaattaacttgtgcaactctgtctcagggattcttgcagagcagagcggacgggctgcagctgtacaaagcgcacactgacaactacatctgctcccttgtccccggagccaacggcttccagtcccagtacacgccaggtacgtagtgcaacttaggtggtatttaaaactcatttagatgagtatcaacattaagattaaatgttttacgtaaaaatgagatggtgtctgattaattgagatgtaattattataaattttttaaaaaatatttatctaatattttatagcaactttcatataaaaagtttttatacgaaacgcaccgtttagcagtttaaaaaacgtgtcacgaatatccaaaatttcatccaacttttgttggagaaaacagaaaagagcataacctatttctttcgtcacaaaataagttaatatggtatgctagattaacttattttagacaaaaaaaaagtaattaatatggtgatttggtgtcgttttcagctgctgagtaaattactgaactgaatttcaatgcaattaatgcagggggtctcctgttcaaagaaggcgacagcaacatgcagtacgtgacatccaccgccttcctcctcctcacctacgccaagtacctctcctccagcgccgccaccgtctcctgcggctccaccgccgtctccccctccaccctcatctccctcgccaagaaacaggtagtactaacaaaattcactcgaattcgacaaaattcaaccaaacagctcactaaaactgaacaaataaactcatctgatccaggtggactacatactcggggcgaatccggcggggatgtcgtacatggtggggttcggggcgaggtacccgcggcacgtgcaccaccgcggcgcgtccatgccgtcggtgcgcgaccacccggcgaggatcggctgcgacgaggggttccgctacctgcactcgccggagccggacaggaacctgctcgccggcgccgtcgtcggcggccccgacgccggcgacgccttcgccgacggccgcgacaactacgcgcaggccgagccgtccacctacaccaacgcgccgctcgtcggcgcgctcgccttcttcgccggagcgcacaagatcttcacgccatgatcgatgaactcgatctagcttacgattaagcttaattatgtacgctacgagatgcatgtgagtgacgatggtgtcacttcgattaattgattaattaattggcgggtgaatgcaattgtttcgcgcctcgatatgattatcctcgcgtgatttgcatgattgtgtttgaaatcagtacgaaattgttggatcacaacgtacagttaacttggcagttcgcaacccaattgaacctctgaattgagacaaatatgggtgcaaaactgaaattttcttctaaaaccgtaatcaaatattccctctgtcccgtagaaaacgaatctaacaccggatgtaacgtattatagtactatgaatctagacagatgttcgtccagatccgtagtactaacatgtgtcacatcctgtagcgcccgttccgtcgtggcgcatagcgggaaaatgtaattcctaaaaaccctaattgcgaaaattgtttcttcgcttgcagtcagtctctgtgccattccagatctcaaatccccgatctatcgtcaagttcattcccaaatccaaatccttcccaaatcaaatccctccgcaaaagtctattttgcctccctcaggttcgatgggccgaattcctctcggcccatctctccctccctccctatctctctctctctctctctctctctctctccctccctctctcccccgctctgcccgtgcgccgcgcgcgcgtgcgcgtgagccgcgccgagccgagcgccctccgtcctcgctgccgcttcccgccgacgccgcccaaatcgccacgccgcccgttgcttcccgcgcgtgcatgccgtggtggccgaccgcctggtcgccgccgccgtcagcctctgccgcgcctgtccgcgcctgccgcccgtgtcgccgctccgctccacaccgcccccgccgtcatcgccgtcgtcacaacccggctccgccactctgcgcgctagcttccaagggacggaggcagagctccccccttctgccgcgtcgccctctctccctcctccttttccccaaagtggcaagggggcaagcccactttccctcctcctttttcccttttctctcccgccggcgtcattcctccctgtcaccgttttggccgcgatcgccgagcgctagctctctcccttgaccgccctaggtcggttcccaaaccgacgttgccatcctataaagcccaggcgccctccctcccttctcctctcgttttgtcccatcgcctccactccattgtcgccgcctcccgtgctctgttcgccgtcgccgttcgtcgtcgtgcgtgtcagaggagccggcacgagcgaggacgcggaaggggactccgggtgcgccctcttcttcctcttccccggcccgaggctggagagatcactcccgtgccgtcggcctctcgtcacagcgccccgcctcatctcggtagtgcattcccccgttctccctcctcgatccatctcctccccttagactcggttagtagcgtgtgtagtaccccagtagctagctggcgccgccccgactgctgctgtcgctcgccgtgtgctcaccgccgtcgccgcccgagctcggaagcgcctctcgtcgccggcctccctcggtgcgtttccccctaatccggcgcaagggatggattcccgcagccgcgtagatgctctcaccgccgggaatcagcccctcgtgacctcgtcgccgtttcccccttttctcgccgccggttgccgccgccgcaatccgccgccgacgaactccctccggcgaatccaagccgttggctcgcaccctctcgttctccctcgtcattccggtgtacaccccgtcgcccctcgtcatcgcacggcgtcccggagaaaccgccgccgcccgccgtccattcgcggccggcgccttcgtcttcctccagccggcccgcgtggcagccacgtcggagccacctcggcacgaccggatcggctgacccggtcagccgctccctccgttccaccctccccgtgcgcgtggtccacggtgagccgtaaggctgcgcgtgggcccgccgcacccgcgtcctccacgagccgcgcgcgtgcgccgtgccccggccaaaccctagcgccgccccgcgtgcacctcactcacggtgagccgagccgccaacaagcgggtcccacccggatccacgcgagatggacccggcccaccggcttcttctctcctccccgcccgcgcgcgcgctttgggccgccttctcgggccggccggcccgttaagttcggccgagccgcccctttctctcgggccgcgccctagccgcccgaggaaagtctaatttccctccctctttcttttcttttcctttctttttcaaaaaggatttaaataaatccttttcctttagatcaaaaatccaataatcttagaaattcaatatcttcccaaccgtaagaccgtttgactccgttcaacttccaaaattcctcaaatctcgagatctatctaatggcatgcttagaggtcaatattagggctttatttttgccatttgttgagttgtcccgtttcgcgtgtagtttcggagcccgaagacctgcaatgcgaggatttcgaggatcaagctcaagatatcgagcaaggcaagccacctttgaatatattgagcctatatttgaacttaattatattgcttgcaaaatattatgcattgataggattgcacttaatctgtttgccccgtctgcaagacagaccggtgggcctacctaacttgttgcatctgatccatccattgttaatcgttataccatgttcccttgtaaccacctagttgcgtctcggtaatcatgcactctgcacgagtatcgacggtcgccttcaaacttaaaatctgagaaacatcttgggtaaaacttgggttttacaaaagatttggaaaacccgacacctaggtcggtgcctgcgaactaaatgaatttccaaaatcgcggaccggggaatgtaccgggtgtacggtttcccgctcttgcacttaaggaccgtttccttggaatttcatccgaacataagacaagtgcgaccacatgggtggaatgagacacccctggctgagtaactagctaatcgggggagccttgatgccgagagacatgtggattcaacggggtggtgtcggggagaacccccgggcttcctggcacagtatggtctgggacctaacctgttgttggtctgggacccctctcgtcggcatatggcaaccctgtgtctgctctcgaaatgccttgtcatgaaagcccttaggtcaccagacgtggccgttctacacgggctgggtgattcgggttagtaatgtcgtgtgggtaaagtgtaccccctctgcagaggttattaaactgttcgaacagccgtgcctatggtcatgggcggatgtgaggtgattcctagcgtagttttgtttgactactgctttgtgaaatttgctgttgtggaattgggttcgatgtttggaaaatctgcggctgatgggatcagccaggcccgggtggccgtttgaaagctgttggccaggtgccaaccttgatcaaatcaaaagactgatacattgcacatactccgaccagacgagacgcactgtctcatccgtgtcgtttgagaagcactcacttagttgtttcagaaaagagtttaaataaaatcaattgcaaaaacaatagcctttccttcgaagcctgcattaaacacttatttcccatggcttgctaagtactcctgtactcacccttgctctatataaataattcccccccagttgctgaagaggatgatgtggatcccgctgacgaggagttcttctaggagcaagtcggttacgaagagttttagggtttcggcctagttcccaagtcgtgcctgtgatgtttggtccaagtcttggcttccgcttttctcttttgtaatacagttgtgagctcgggatctgtccgtagcccaacatgactgtactcctactctataataaagagaccactgttgctgtgatattctgtcttcctgtgataccagcactgtttcctgggactggtatcgattaacaggttaatttggagcgtcacgggctagttccgttcggggctagttcggggcgtgacacatccagtactagttttgattttttatacgatggatggattactctctatgtttttatttgctttgagtggaatactccttttttaatttttatacaccatttgtctttctaaaaaaaattaatgaaaataaaatatgtagatattcttaaaatgcatttaatgatacaaacaagtaaaataaataaatgttattgataaataatagttttttaataagccgggtgttcaaatgcctatatttaagaatcaatactatgaaatacgagtttttatttaagaacggagttaatacaatgaaatatgagtgggaacatgtacgttatattacttgaccgtgcgcacgaggttgaatttttggctcctcccatccagtagttaatatgaaaattaatcaagtcggcattcaaacataattttgagtacatgtctccttgtttttctgccgaatttgtcaactaagtggcggcgttcttgacaatcatgcattgtcttggtattcggctgcatacttttctacaggttcccttttgttttgtgatatgattgtgctgacccaacacaaacaatctgcaaaataagttatgtttaatgtttatctgaacagtgataaatagcgcacaaagtcttctttctttgacaaggtcagtggagcatttcgaatggcattagttgcgtacgtgtattatgttttcatagtctctgatctcaagctagcaagtactcccttcaatttaaaatataagaatctctatgatttaaacttttacataatatatacatttatttactgatttttacaattctcattattatttcaataatttcaaagccaaccagatattgggaaagaaaatctaagtaattcaaaaattaaaaaaatattgaccagtgaagtgacgaaataaaaatattttgacctaaacaagtattttgctaataatttaaaaatacttatattttagaacaaagcaagttgtacatatataaagactttgcctctgtttgattttgtatatatccactgaaatactgcgtacatatatttactcccccagctagagttctgctgacaaagcaagataaacactgtgatttgaacgaggaaaaacttgcatctctgacgatgatggtcgatatgatattgaccttgattttgaaaaaaaaaagagggactaaaatcaacacaaatagtaagaaattgtggcggcgtgagaaaaatggtactgtaccgtgcatgcaaggccagtctccactaccgagtctataaatacagccctaaccaaaatggaacataagcaaacagcaagaactgcaactagatcttacctgaattaaagaagaaaaatctgtagagttgcagaggcattgcagggtatcagagatgatgaggaagcaatactctttcactctttgcctgatgctcctgcttgtggctgctctgctttgcaccatgaacaccatctccgtcgaagcaggtaattagccgcgtatgtttgcatgcatgctaatttatctgtgaacatttctctatgtttaagcaatcatttagaaacttctgcacgtgtgtaataaatatattttttgttatccacgtaggaaggggcggttacaattcagtgaatcccgatggtatatgaaccgcgaaaaacccacaacttaattaagcctacacttagagcatctccaatagatgactaaaattaaactcccaaaaatcatgtattggggacagccaaaaacatatttagcctaaaatacacccccttctccaagagaggactaaaatttgggagcgcttctagttgcccaatatttggttcaggttggtcctggttttggaggtggctaaattttgggaccatgcttaggagtctgttggagggctgattttcaccaaattcctaaaatttatgttttagtaacctgtttagcattctcttggagatgcccttagatgtgttttcactcctaaattttctacatttttacaccatatgtatatgggaagttgtttacaaattttgcatgtgtatacttaaataaccttttgttgtccatgcaggaaggagcggttacaattcagtgaatcccgatggtatatgaactacgaaaaccaaacttaattaagcctctatttagatgtgttttccctctgaaaatttccacatttttacacatgcatacatatgtttttaagttgtagtttagacaatttgcatgtatgtactaaatatgtttaattgatgttcttgcaggaaggagtgggtacaattcagtgaatcctgatggtatgcactgtaaaaaaaaaagccaaaaagccaacttaattaagcctccacttagatgtgtttttgctcttaaattttccacatttttacaccatatatacatatgtttttaagttgtttagaaattttacatatgtatttatactaatcgtgtttaattgttgttcctgtaggaaggagcggctacaattcagtcaatcccgatggtatgggctgaggatggcacgaaaacccaactatagctagccttcacttgattaatatgcacataaactaaactcaaagttatttatgtgcatatcccatttttccgccataacacataggtttttaaattgctatagatatttttccatatgtatattaaatatttttgttgtctttgtaggaaggagtggttacaattcagtcaatccgaatggtatgaaccgtatttacgaaaacccaattcaataaagccccctctttgatgtgtttttttcctctaaaaattccctaatacttaacgtgaaatataaaatggtttctgaattatttttgaaaattttgcatgtgtacaatgaataattttaatttgttgtccttgtagggaggggtggctacaattcggtcaatcccaatggtatgaaccgaggacgatgcaaatacccaacttgagctcgcacttgctgattaacttgtgcagaaactaaactcaaatttatcttatttttgcatttattacaattgacatatggcctggtgataatgcaggaaggagtggctacaattctgtccctagaaacggcggtggaagcccatagctctaactgggccaatgaagcaagcaaagcattcatgatccagtccaccagctaatatacagcccaagtttggatgaatatatctgtctatgtatgcagatatatacagtgtattctaaataaatacgtacgatctagttgatcggcgttgcatggtttgaaaaattatgtgtggaatttgtacaagtattgtataatgtattggtctaccgtgtacgtatgtaattaagcatcttgcttctttatttcacttgttcctaggagagagagaaagagtccattttagtattaaaaaaaactcccttcgtctgtcatattacaagttattttaattttttatattcaaacttagttaagtttaatcgagtttataaaaaaattagcaatgtctacaatagcaaattagtttattaaaaccaatatttaatatattttgataatatgtttattccgtgttcaaaatgttgctatattttcatagaaacttgataaaaacttcgtcacttcagcaacaatgcgccaatcgacgtgtgtatatgcatttggtcagttgacagttcacctgaatcacccctcgcaatgcgaagctttctgcattcaccaaacatgagagctcagtaaacaaaacaatggcatatctcaaactttaaaaaattataatggcatggttccaaattacccaattaactactgaggagtacactatagatctgaatgctgcctgccaatctcgaccggaaaaatacttaatcacacagcaaatggttggacattgtataaatcgatcagcagcaagcagtatacattcagaattccggagagtaagatcgatgttcagtaaattcaggcatcccggcagatagtgatcatcagaacacattcaccaatcaaccaaatctcttcttttcaccataaatcgatcgatcagattgcgatggtgagggttgccgctgttgctgctgctaactgggtgctagaacaaattcacggcgcaccagtagaagcattgaggcaatgcgatgaacacagtgatggaatcaatgcttataaatattcaactataatttggttagttagtaccaggatcttacgtttgatatgtgttcctttttagcaatttttctctttatgcaacattcctttttagcaatttttctctctatacacaaatctcaatgtgattcgatgatcacaaacctcaaagtttcagatataattacattataactataatgtaattgcattgtaactacacggtaaatacgatataacttatataaaacttgaattcaactctgatttggttacttagcaccggaatcttacgtttggtatgtgtgaaaatttctttttagcattttttttctctttatgcacatatctcgatgtgatccgatgatcacaaaccttaaagttttgggggcaaaaagaacttgcaaaagttctctctctatatattgtccagttcaggttctatagagagatcgattatgccagcaacaacaatcaacgatatgccctgcgctacgcatcccctgcatgctggctgctgcgcccgtcggtaacattcttgcagatagtgtacgcaattttttttataccaaactttatttcctctatattaaaaatcaaatcaaaccatatatggagtaattaagaaatcaaataagttcgctgaggatatgtgagtaaaatggttgcaaattggaaggaacagtacaatatagtggctcgaattaatggcgccgaccggagtaattaactaactagccgacgaagggggtgcgcatgacggggccgacggcgtcgccggcgttgaagaagacgcggacgcggttggcgtcgaagcccggcggcacggtggcgccgtcggggataacctcgatggagacgtcgggccggtcgccgttgatctgcgtcaccgccgccgtcgccggccacccgaccacctccggccacgacgccttcttctcgctgctcatcctcgatctgcgccctttctacttaatttctaccagcaagctgcagagataactagttaattagttgcatgcaagtgtgtgctcttgtgctattgattaagctggtatatataggatcagatcagagttaagccgagcatggatgcatttgctgattttgcattgggcatgtcaccgttgccggagcaagctttggttgtaactcctaatttgatgatttgcatctgtcctagctagtgtactatagttagtaccactagcttaattagtacgtaacaaacaatcaaacagccgggtcagttgcatggatatgttctgttctgaagagcatcatcggagcggctgcgcagaaaccccaaattttaggcaaaataatttattgacaaatatacctatcaaaatcgcccacacgtacgggaggtaccagcctgaaacgaacgtcgttcccaaaagcatcgatcgccaatatgttcttgggcgacggggctaccgatcgatcgagatggtgtgataccgatggacgatgatcgatatgggtatgtaaacaacacaaggttaatttctagcaatgcagatgcagatggctttcgcattttccagtggatatcctatcctcctatgaactataaatgttccccatctcgttacgcgtgattaaaattcgagatatattataattggatcgccggatcatcagctagctaattaggtcagctagagaggccggagttaacaacaagaaggagcaatggagaagaagaaggtgaggtgggcggaggtgctgggcgagctggcgccgctggcggtgacgcagatcagcaacgacaggccggacgtggcggtggaggtgctcctgcgggacgccgccgccgtcgtctcgccggagttcaaccccaagcgcgtccgtgtcttcgtggacaacaacttcatcgtcgtcaaggtccccgtcatcagttaattaattactaatatactccctcagtattttaatgtatgacatcgttgacttttcaatcaacgtttgaccattcgttttattcaaaaattttatgcaaatataaaaatatttatgtcatacttaaaaaacatttgatgacgaatcaagtcacaataaaataaatgataattacataaaatttttgaataagacaaatggtcaaacgttgaaaaaaaatcaatggcttcatacatttaaaatatggaggtagtatgtatgataaggcacgtacgcctgccttatgctccatttgtactgtatttatgcgtatctcagactcagcatcgatcatctctctgtgtgtgaagcaaacagcaactcaaaattaacatgcatgtatatcatggaataaataaatcggtaccggaacattggtatcttcaataattcaattcgtcctagctagatagctagtcaggttgcattgctagtagcaatgctagccgcctgctgatgcatattcttgcatactccagctaatgcatccaattaatccaattaagtcatgaccaatttaatcaatcgagatcggcagacatatatatgtagatgcggcaattaagcggcatatccttgatctggactgcttgctgatggacggtggatgaaagcaggagagtatagaaccattttctcttgagacgtcagaaactgaattttatagacatattaatggtaggctaataattcaaatataattagtgcaaacaccacagaatgatgttattttacaaacaaaacatacatgactatttaagcgaaaatcatattttaaacaaagtaaaaatctagttcaccgcgcttgtactccctccgtcccacttaataaggcatacacatattttaaaatttaaatctttaaatatttaaccaacaatattttataaattagatttcttttattaaaaatagtattttgattggtatttgaatttactttaatataattatgattttgttgctacaaacatcatagtatttgagaaattcaaagtcaagtagttctaaagaccacaccttagtttttttcgcgaacgcgcaaagaccacaccttagtaagtaggatggaagtagtatgcgttaagtaaaatctacagcattttcaagttcataaaatctcatactttacggccctccctggcatattcaaaatcttttatgtgtgttttcatgaaaaatagtcatgaggatcatcggtgataggttcggcaatgaggtctgaggtgagcctctccgggtgcctatgtgacggtgcctaagtgcctatctgattttggttggaggcctttgtcacagatgatttgattgggatgttaagttatgtacttgtaatataacatctatcttatgtttatcatcagtgcattacgttctattatctctatctcaaaatattatatttggttgtattttatttaatactaaattgttatattttgatattgatgagtatctggtcttaactgacagaaacgccaccactctcgcttgttcgcttcctctgaccacgtccgatcgccggcatttctagtactcactaattaacttaaagcataaatattaatcacctcatctttacttagtacaaaaccagcaaatataaatcagctactgatcatatcgtttgattagcccaaccagtaatacgggtacaacaaggtaataaaacaagttaggagagccaataacaattaactgggcgatgtaggcaatgcaattgacctatataaataatgaccaagctagccatctagcccacacatcatatcactccctatctaagctgattaatcacctgttggaattaatgaatgggtcttagcccactcgaagattaattctttggaaaatcacaaaagcccacctcatgggatggcatgcatgtggagtttagtaccaccttgcttattctaggagagggggacctccttaaaagggaggatgccctcctagccacttgaagcatgtgtggtggagagaagaggggaaacacacgcgcgcgctcgctcgcctcgcctggcctggcgcagtagagatcgtgcgggcgccctgatcaagcgacctttctctatataaaccgacccgccgtcttcacgcaatatatgcgaaaatcaatctagggtttgccttctactctgtactgcgccgtcgctcgtagactactccatcccgctcgccggcgtgcaccagcgatcgggagagcaggtctccggaacctctgcctttgacgtcctgcaccgggagaaggcggcaataaggtttttgggaagcgcttcgcgcgactgctccctgttcgttcgcgacggctcgccttcctcttcgctcgcgtgtttcgtgccttcgtagacacctgcgaaaagtttcgaccaagcagccggtcttttcgtcacctcggtacgtgttcaatatgttgcgcatatttgatctgttcatgttattctgcgtagtttacatgtgtagatctaatgatgcgttcatgctagttttcatctgtaatgtcatgacttatttatggaataaattaaatcattatatgcccataatctcaacaatccaaaaaccttattataggcactgtgattttactatggctggttttgccgatgcactgaggccggataaattcaccggtgtgcattttaagagatggcagatcagggtcactctgtggctgacagctatgaaatgcttctgggtgagtactggcaaacctgaaggagttcttactgctgaacagcagaagcaattcgaggaagccactactctctttgtgggatgcattcttagcgttcttggcgatcgtctggtcgaggtgtatatgcatatgaccgacgctaaggagttgtgggatgcactgaatactaaattcggtgctactgatgctagcaatgatctgtatatcatggagcagtttcatgactacaaaatggctgacaaccgttctgtagtcgaacaggctcatgagatacaaaccatggctaaggaactcgaactccttaagtgtgtcttacccgacaaatttgtggccgggtgcattattgcaaaactacctccatcttggaggagtttcggtactgcactcaaacacaagagacaggaatactccgttgaggggttgattgcgtctcttgatgttgaggagaaagctcgggaaaaagatgccgcgtctaagggcgatggtgggcagtccagtgccaatgttgtgcacaaggcccagaacaagagcaaggggaaatacaaagctcagcagaccaccaacttcaagaagcagaagaagaacaacaacaatcctaatcaggatgagaggacttgctttgtgtgtggccaagttggtcatctggctaggaagtgtccacaacgcaaggggatgaaggcacctgcagggcagacttctaagtctgctaatgtgaccattggcaacactggagatggaagcgggtatggtaatttacctactgttttttcagttaatcaatctactaattggtgggttgatactggggccaatgtacatgtttgtgctgacatctcattgttttcttcttatcaggtcgcacggggttccaccgtcctaatggggaatgggtcacatgcttctgttcatggtgttggcacggtagatctgaagtttacttcgggaaagatcgtgcagctgaagaacgtgcagcatgtcccttctatcgacaggaatcttgttagtggctcccgtctgactagagacggatttaagttggtttttgagtctaataaagtagtcgtgtctaaacatggatattttattggtaaaggttatgagtgcggaggcctgttccgtttttccctttctgatttctgcaataagtctgtgaaccatatttgtggcagtgtggatgatgaggctaatgtttggcattcacgtttatgtcatattaattttggcttgatgtctcggctttccagcatgtgtttaattcctaagttttccattgtcaaaggttctaagtgccatagttgtgtgcaatcgaagcaacctcgcaagcctcacaaggctgccgaggagagaaacttggcaccactagaactcctacattcagatctttgtgaaatgaatggggtgttgacgaagggtggaaaacgatatttcatgacattgattgatgatgctactagattttgctatgtgtacttgttgaaaacgaaagacgaggctctagactattttaaaatttataaggcagaggttgaaaatcaacttgacagaaagataaaaaggcttaggtctgatcgtggtggagagtttttctcgaacgagtttgacttattctgtgaggaacatggcatcatacatgagaggacgcctccctattctcccgagtctaatgggattgctgaaaggaagaaccgcacactgactgacttggtgaatgccatgttggacaccgcgggactgcctaaggcatggtggggggaggcattgttgacctcaaatcatgtgttaaacagagttcctaacagaaataaggacaaaacaccatatgagatatggattggtagaaaaccatcactttcttatttgcgcacatgggggtgcttggcgaaagtcaatgtaccaataacgaagaagcgcaaacttggacctaagactgtggactgtgtttttctgggatatgctcatcatagcattgcctatagatttttaatagttaaatccgaggtaccggacatgcatgttggtacaattatggagtctcgtgatgctaccttctttgagagctttttcccaatgaaggatacacatagtggttcgaaccaaccctctgaaataattcccagttcaatcacaccaccagaacaaactgaacatacacatgaacttgtctctgaggaggatgtcagtgaagctcctcgaaggagtaagagacaaaggacggctaagtcttttggtgatgatttcactgtgtacctcgtggatgacactcctaagtcaatttcagaagcatatgcatctcctgatgcagactactggaaggaggctgtccgtagtgaaatggattccattatcgctaacgggacttgggaggtgacagagcgaccctatgggtgtaaacctgtggggtgcaagtgggtgttcaagaagaagcttaggcctgacggtactattgaaaagtacaaggctcggcttgttgctaagggctatactcagaaagaaggcgaagatttctttgacacttactcacctgttgctagattgaccacaattcgtgtgctactttccctagcagcctcacatggtcttctcgttcatcaaatggacgttaagacagcttttcttaatggagagctggatgaggagatctatatggatcaacctgatgggtttgtacttgaaggtcaagaaggcaaagtgtgcaaattgttgaagtctttgtatggtctgaaacaagctcctaagcaatggcatgagaaatttgacaaaacattgacatctgcaggctttgcagtcaatgaggcagataaatgtgtgtactatcgccatggtgggggtgagggagttattttgtgcttgtatgttgacgacatactgatatttgggacaaacattgaggtgataaatgaggttaaatcattcttgtctcaaaattttgatatgaaagatttgggagtagctgatgttattttaaacattaagctaattagaggtgagaatgggattacactcttgcagtctcattatgtggagaagatcttgaatcgctttggctacattgatagtaagccttctccaacaccttatgatcctagcttgtcgcttcgcaagaacaagagaattgctaggaatcaactggaatactcccaaatcattggctcgttgatgtacctggctagtgcaactaggcctgatatctcctttgctgtgagcaagttgagccgatttacctctaatccgggagatgatcactggcgtgcgcttgagcgagtaatgcgctatctgaaaggtactgtggaattggggcttcactatactgggtatcctgcggtactggagggttatagtgattctaactggatctctgatgtggatgagatcaaagccactagtggatatgttttcacactgggtggtggtgctgtttcatggaggtcttgcaaacagacaattttgacgaggtcaaccatggaagcagagctatcggcactggatactgctactgttgaggcagaatggttgcgtgatctattaatggatctgcctgttgttgaaaaaccggtgccggctatccttatgaactgtgacaatcaaacggtaattgtcaaagtgaatagttctaaggataatatgaaatcgtctagacatgtgaaaagacgattgaagtctgtcaggaaattaagaaactccggagttataacgttggattacatccaaacagcgagaaacctggcagatcccttcacgaagggactatcacgaaatgtgatagacaatgcatcgaaggagatgggtttgagacccatgtgagttatactatggtggtaacccagtctatgtgatcggagatcccgtgaattagatcctgggaagaacaaaccattaataaactagaggagagtaccaatatatataccctctctaagtgaagatgcatatactctcgtgagctgcaaggcaggttggctatgccttaatgagttctgttggctttaattagcaaagatgttgtcctgcagagcattcttgaaggaactcacctttgtgagcttgactgttggtcgcagtccatgaagattttgggtgaatcttctaggaagcttactaaagacctaggagtatgacttatacgctccacccgaggggtagtctacagacggtctagtaccagataagactttgagtgaaacttgcttgcacaagacttgcaattcaaggcgtagtccattgttcaagttgtgagtaagtgtagcttggagttctaggtggatgttcaaccttaattggtctccatcgaaccgctggtatataaacagtacattggaaaaggcaaatctcagtgggattttgagatttggtgggggattgttggaattaatgaatgggtcttagcccactcgaagattaattctttggaaaatcacaaaagcccacctcatgggatggcatgcatgtggagtttagtaccaccttgcttattctaggagagggggacctccttaaaagggaggatgccctcctagccacttgaagcatgtgtggtggagagaagaggggaaacacacgcgcgcgctcgctcgcctcgcctcgcctggcctgggcagggcaggcggcgcgcgtgcacgacgtacgcgtcgaatggtccgaaaaattggctcctcacccttgcgcagatgcagcctctttttgcagttttgttttgctgcaaattcggattcgtttttgttttggaaacgttccgaaaaatccgatgcgtgcaaacggcgtggagtccggataagttacgcgcgacttatccggttcggttacgcgcagtagagatcgtgcgggcgccctgatcaagcgacctttctctatataaaccgacccgccgtcttcacgcaatatatgcgaaaatcaatctagggtttgccttctactctgtactgcgccgtcgctcgtagactactccatcccgctcgccggcgtgcaccagcgatcgggagagcaggtctccggaacctctgcctttgacgtcctgcaccgggagaaggcggcaataaggtttttgggaagcgcttcgcgcgactgctccctgttcgttcgcgacggctcgccttcctcttcgctcgcgtgtttcgtgccttcgtagacacctgcgaaaagtttcgaccaagcagccggtcttttcgtcacctcggtacgtgttcaatatgttgcgcatatttgatctgttcatgttattctgcgtagtttacatgtgtagatctaatgatgcgttcatgctagttttcatctgtaatgtcatgacttatttatggaataaattaaatcattatatgcccataatctcaacatcacctaattaaacacactgatagctattttagtttagtgtttccgatcatcctctgagggagagagagagagatggggagggcggcggcggccggcgacggggatagtctgaagacggcgtggccggagttggtggggtgggtggagctgaacgcggcgttccagatcaaccgcgacaggccggacgtccacgtggccttctacatggtgggcacccagttgccgacggaccacgacgacctccgcgtcatcatcgtctccgacgccggcaccgtcgtcgtcaggacacccgtcgtcggctaataagctttctagctagccacgccggctagccgtctagtactgaaataattaattacacataagataaaagaaaaaaaatcaattctagggtctctgaacacgcacgagtccagattcataattagtattgagttttttgtagcacgaggtgttgtgctgtgtagctgtgcgcacgcttgtatccgtctgtatctgtgtatggctgcatgtttacacgcgtgcagtagttctggtcgattggtcaatacgtgctatatatgttccttttatttttgtgagcgagatatttcacttaaaaaaaattatgaacgagatatgagagtacatttaggacacattattcatcgtatcttactcaacacgtatgtgtaattctcgattatacctcttggatggtcaggaataaaaagatccagaatttagcaaagggcatatccctccatttccattaaagaaatgtaggatttctacgcagagtagagtgttgaaccaggaggggggacgaccgcccaggtactcattgctcacaggtaacgaattgaagtgcaagaaaacataagatgagaagcaaaacgaccgggatgcatgttgcatgcttatttcgagtgtgccgattgttgtacaggaacgaacgtacgtattgtaagtcaccgattggtgacttggtacgtagtgagacttgttaatttacacccttattaagttcttatgtaattgatactagtgattttttttaatatatcatttatcttatctaatttttttctagatataaaaagacttaagccatgtttaaagaacatttgatgataaatcaaaataaataaaataaatgataattgcatgattattctgataagacaaacagtcaaacgtatcttaaaaaaattaacaacattatatattaaaaaagatggaatataatgtaattctctctctatatatatctttggtttacacggaatagctagagaatggagtatatgctcgtcaatggaagtttaattacccagcctagctagtaacaacggctggatatataattatcacaacatttattaaacaatcgaatcactataataaaatagcggtatgtgtgtaggagaagatgtcgttagttccggcactcatcgagggcggcatacgcgatatatatgtattaaccatagtaatcatcaaatgattaacatcgatctagccaacgtccacatacacttagtaagcatgctctatgttatgatcagtaaattaattaattaatgatcaatgcaagaggtgtacgtgctatatataagttcgagcgagagacactagatatattgatcatttgactcaaccaatctcagttgatttgggtacaaactgaattaagctagagaatgggcagagacatgccggccgccggcggcgatcctcaggtggcggcggcggagcagctgcggcggctgaagtcgtcgtggccggagttggtggggtggccggagttctacgcggcgctgaagatcatcgacgagaggccggacgtgacggtgtacatgttccgcgacggcgacgacctgccgccgccggagcacgaccccgcccgcgtcgccatcttcgtcgacggcgacatccgcgtctcccggactcccgtcgtcggctagctatatatgcccatcacccatgcttggctgcgcaatatatatattctctccgtttcaaaatgtttgacaccgttgactcgttagtacgtgtttgaccattcgtcttattcaaaaaatttaagtaattatttattattttcatatcatttgattcattgttaaatatactttcatgaacacatatagttttacatatttcacaaagtttttttgaataagacgaatggtcaaacatgtgctaaaaagtcaacggtgtcaaacattttgaaacggagggagtacattttaaaagctttttaccattcttaagtacgtgatggtatctcgattgatgccttgtgatactggccacgtgttaaatagatgtaagaggaggtactaatgtgcaagggtaaaaataatacctaccctactcctctgatggtaccctctctggtttacgatacttccttaaggcttgtaaaaatcttctaaactataagcttgttgtattttctggacacaaagcctcagcatacggagcttttttacggaccttgagaaggtaccagatatgaagaggtaccaactaaatcagaccattcatcttgcaagggtaggatcgagcttaaaaaataagcgggctttgtctacagcttttttgttctcactggatctttcaaagtgtcgcacttcgtcacagcagcgtacgtgaagagagctcgcaccggccatcacggtgataacggcaccgtcagatcacctcgcttgcagtggcgcggtagcagctttcctccatcgctggccatcgttcctccctggatatccgtgatgccgagtgtgtcggacgccgccatgctgatccaagtcgaaggaggttgacggagggaaaaagcatagcttaggcacctggaaggatgccaactgggaggagcggtgatgctaatctagcatgacgaagttcgacagcggggactagcgacagtgagatcaaattacaatggaaacgcgccgctcataatccccttccatcgcaacctcgtgccacagctgttcactgtcgtctccatgccgccgtcgcatccaaggcaccgttgtgccgccgtcggatccacctcaccacggccaccatctcatcgatcccgtcgtggccaccgtcgcatccaccccgctgccactgcttccgtcgtatccatggtgttctctctcgtcctgcctgtgatgccgcgtgcagggagaagaaagagatgcgtgcgatgaggaagagaacgcgaaaaagacaaaaataccctcccacctatataccgcatcgatcaatcttgcactaccacgtggtacgaggctgtatcagccgtttggtggggctagatggatggccaagattcggtatcgcgcaggctcaaggacactaaaaatctcccataattttattttttttaaaaaaaaacacatccaaaaggggttcggagattaaaactccgaacgccgttgagccgacctgccttcagctaggtgctcgtgctaaccagatgcgcgcggggggtcatcgatttgtccacaagcacgtcaagggggttcggaaactaaaactccgaacccactagctctgatttctcctgttttgtgtttaattaattctactcatcatgtacctatgccaaattgctaaactgtcaaaaaggattaaaaaaaattgcctggatactatctctctcgatcacatcgaacaagaaaaaacacaatggatacatatgcattgtctcctcatcgacgagttaattaatcccggtgttgtgatgccatgccatctgcatgtacgtatataaagcacacctacgaccttattacaagcttaattgagaatcaggctgtaacatatatacatcgcgatcgagaggatcgaggatggggagagcggcggcggcagtgggcggcggcgagatagtgagcataaagacggcgtggccggaggtggtggggtgggatggcatgtcggcggtgatgaagatccaccgcgaccgggcggacgtgcgggtggaggtgcacaccgtcggcgagagcgtcccgccggggttcgacggcgagcgcgtcctcgtcttcctcaacgacgacaacgccgccaccgtcgcccagacgccagtcgtcggctagctagccccccatcggactactggatcggatcagactcgctagctatatactccgtcccttacaggttacaagacgtcagtcagagtcaaactgttttaaatttatctaaatttataaaaaaatatagtatttttataatactaaattagtttaatcaaatcaataattgaatacatattcataataaatttatcttgggttgataatgttactattttttttctacaaacttggttaaacttaaaataatttgactttatttaaagttaaaacgtcttataacctgtaacggagggagtagcttattatcctcaataatacttactactgataaataaagaattaattagtggtcttatgacttgcgagcctgatcgatctatcgatcatgtctatgggttaaattcaagttaagtactgtactacatatatgccttcctgtgaagataaagatgtcttactattaattcatacgtgtgccgtgtaccgtgtacgtgctatatatgtccaatgcaaaatcagcgcaaatgctgctcagtttaattaatactgatctgatctgatcctacatccagctgagatgcagttccaatccaacacagcatccttaatcaatcacacaagtgcagcacttacttgtaactaatctccactgtagcacgcaccggcccgggccatagcgcatccccttcgtcggctagttactacacttaatccatgatccatcacgggtcgttgcaattaattctagccactattccaatatggaacaatttacttccatctcagcgaacttaattatttcatccgtttcatattatcagactttctaacttttgtcacattcatatatatgttaataaatctagacatatatatgtgtgtctagattcattaatatctatataaatataaagataaatagatccaaaaacaagttagtcacatactagcccacaaagctcgtagtgagcatctctccaagttttggcttggtaactcttgcagtttaatttttcagtatctctataaggatttgttggttgagtaatatattcttgctcttctctgcaaaaaaaaattatatgaatgtgggcaatgttaaaaaatttttaaaaatctatattcttgcagatgtagtatttgatttgatttcttattaatgtatagtttgattttaataagggagataaaatcgggtacatattttggtgggctgtagtgggccacgccacgttacacaagaactagacccaaaacgggcctgaaatccaatgggccaatacagccatattcgtattgccgcgcgcgatgcggcggcggcgcgcgccctagtgatcgccggcgacacgccggcacaccctggcctccttgtacacccttcccggccggcagaggtagcccttctccggcgagcagtgcgcgtcctccgagcacacgcacagcccctccagcgcgcacccgtccctcaccacgctcacgccgccggcgccggcgacgccgagcaccttgtcgctccactcgctggagaagagcccctcggggtcgtagctgcccttcaccttgaggaactcgccggacttcgggtacttggcgatggcgccgtcgaaggcggcgttccggttcttgccccagtgcgggacgccgccgtacttgcgcagcgccatctgctcgatctcctccaccgcgtcctcgtgcagccgcggcgccgccgggtcgcggctccggtagtaggtgaggtcgagctcgacgctgtcctcaggcttgccgaggtgcgccgtcgacgccctgacgtagcggaggaggacgccgtagtacacctcgaggccgcagagcgcgtccgggttgaggtcgcgcagccgctgcacgtcgcggatgaacgccgccgcgccggagagcggcacgctgatgccggactggaagaagaaggagttgtgcctgacgcgtgggtcccacgtgcaggcggtgaggaggccgtcgtcggcgccggagaggcaggaccccgacgactggatgcggttctggtagccgaccaccgccgcgccgggcggcggcgggagcacgccgcgcctcgtgacgccgtagttgccggcggcgaggcgggctatcgtcgccgacccggcgaggcacttgccggcggagttcgccgtcgcttcgagggcgtcctcgccaatcctattggcctggatggcgaccgtggggctcgactggaagacgacgagatcgtagacggcgccatcgccggaggtggtgttgggcacgcggtcgtcgatccggtacacggccttgccttggctgggaagccagaggatgtcggcgaactcgtgctcgccggcgaaggcggcgactcgttccgccaggtcgtcgtcgtcgcgccgccggaacgccaccgagcgcttgaacattggttgcagctttagagttacctgatcaaattcaaactttcgaaaattaacggagcagtatttacagacaaaacaggctaattaatgaaacaatcaggttaaatactaagttgctcagtacggggatatttgctttcaatgatgagaaacgagtagtaaaggtttgagaggacatgccatgtcccatgtgagttgttgagtaattccgttaattaataacttcacaaaaattggccaatgcatctaattaatagaagtgttcaaatttcaatgatgattttatattttcttgagttaattttaagagtgtattatattccatctgttttgtaagactttctaaaattgctcatattaatatagatgtgtctagattcatatctacataaatgtggataatgcactaatgttagaaagtcttgtgaaatagatgaagtatgtgcgtgtgcatctttgtgtaaaaatattactatatagagagagaagaaaaccagctgttgaaatgttgaactcgttgcacctgagaaatgaccccgagcacgccgagcgacaccttggcggcgtccagctccgggtcgccggcggcgagcacgcggaccttggcgtgcccctcgctcgccggcgccggcgtgacgatcctcatgccgacgacgtactcgtgcacggcgccgcccttcccccacaccgagctcccgtgcgcgcccgtcgacagcagcccgccgacggtgagccccagccagtacggcgagtgcggcagcgcgaggccgccgcccgccgcggcgtcgatcagctccgccagcgtcacgccgctctccaccgtgatctccatccttccggcgtccacggcgaccacgcggttcagcgcgtcggtgctgatgacgaggccgccgccgccgccgccgccgtcgccggggcaggccagcttgggcacgctgtggccgtaccgcgtcgccaccttcatcttggtcctggacgccgcggcgccggcgacgacgcggaggagctcccgctcggacgccgggtacgccgcggcggcggcgcggcacgtggagcggtccgggaacgcgccgtacgcgttggtcacggtgcagttggccgtgcccgacgcgcacctgaccggccccggcggcgggctggcgccggcgaagcgaacacttgcgcagagaagcacggccacggcggcgaggagtggagcgccatgggtgatgcgccggcgaccacccggtgcacctcgccggcggcgagcttgcagctgctgcatggttagcttaatttttttggcctgtagtgcgtgattgcttgtccggttggtgacctgctgatggggcatgtcatttcgtgcatggagtttgggtttttaaaggcacgcggtgcccttccatttctcctttttccttgaattggagagtttgtttttttggttcataaattgatttcacatcacgtggacagcattaatgcgaagcacgattttcgttgaaaaaaacaaacagcacccatgcattgagcaacataaaacgtcaaacactctcgattatggcccggatataaaacgtcaaatatataattacacaagtgcacatcacttctgtgcaacttaaattacttaggcattgttaatattgaagccaaaataaacctttttaaattttaacaacattttttatatatgtatttattaaagtttggtaagaaactaaatggatgcacataatttgacaactctaaaaataaataaatatggtttaaaatggcatcaatctgaataaacccttagcgatttgactctactcccatcgtttcaagaatgttttaagataatttatctatttgaaattactccatccagcttaaaatatatcaacataaatttagatgatggaacatactctaatcctatcttttcaagggtgttctaattaagatattttattgtagcgcccgttccgtcgtggcgcctagcgggaaaattatctcttaaaaaccctaattgcgaaatttgtttctttgcttgttgtctagtgtccgtgccatctcagatctcaaatccccgatctatcgtcgagttcaatcccgaatccaaacccttcccaaatcaattcctccgcaaaagtctattttgcctcccccggggtcgatgggccgaatttctctcggcccatcttcccctctcccccggccctctcctctcccccggcgcgctcccgctctctctctctctctctctctcgccccctccccttccccggcgcgctccctctccccctctccctccgctccgctccgccccgcccgcccgcgcgccgcgcgcgcgtgtgcgcgagcaccgcgccgagcgccccctccctttcccctcgctctccttctcctctccctggcgagctccccgctcgcgaagacggcccccgcgcaccgtcgttcgcgtgcgcgcccgcgtggttccccgcccgagccgcgtcgtctgcgccgtccgcgtcgcccggccccgctgctctgtcgcgcctgcagccgctcggccccgcgagccagcgcgcgtgcccagccgcgccgcccgttgtttcccgcgtgcgcgtgccgagtggctgaccgcctggtcgccgccgccgtcaccctctgccgcgccagcccgcgcctgtcgcccgtgacgtcgcgccgctccaaaccgccccgccgtcatcgccgtcgtcatcgcctcggccccgccactcccgcgctagcctccaagggacggaggcagagcctccctcctccctctgccgcgacgccctcgctccctcctccttttcccgaataggcaaggggacaagcccccttttctctccctcttttcccctttttccctcccgccggcgtcatcctcctccctcctccctgtcgccgctttggccgcgaccgccgagcgctagccctctcctttgaccgccctaagtcggttcccaaaccgacattgccatcctataaacccgagctcccccccttttcctttcctctcccattcacctccgcgccattgccgcccctctgtttcgccgtcgccgttcgtcgttgcgcgtgtcggaggagccggcacgagcaaggacgcggaaggggacttcagccgcgccctctccttcctcttccccggcccgaggccggagagattacttccgcgccgtcggcctctcgtcacagcgcccctcctcacctcggtgatgcctccctccgttcttcctcctcgctccatctcccccccttagttttcggtggtagcacgagtagcctccccgtagctagccagcgccgccccgaccgttgccgtcgcccgccgtgtgctcgccgccgtcgccgctcgagctccgtagcacccgctcgtcgccagcctcgctcggcgtagctccgcccaatccgacgctagcatcggattcccgtggccgcgtagatgctctcaccgccgggaattggcccctcgtgacctcgtcgccgtttccctcttccctccccgccggttgccgccgccgcgattcgccgccgtcaagcttcctccggcgaatccgagccgttggctcgtctcccctcgtctcgtgcaaccacccggtgtgctcgttttcgccggtatcgccgtggtccgctccgccgctcgccgctgttgtccgccgtccgttccggccggcgtcgtcgtctacctcccgccagcccacgtggcagccacgtaggcgccacgtcggcgccagctcagctgaggttgggacgggccgaccccggtcagcccttcccgtgcgcgcgttccaccgcgagccgtgaggctgcgcgtgggcccgccgcatccgttcctccgcagaccgtgcgcgtgcaccgcgtccctcccccgcccgcgcgcgtgcgccgcgtactccctccggacggtgagccgagccgctgacaagcgggtcccacctgggaccgcgcgcggtgagcccggtccaccggctctctctcctccctcccgcgcgcgcgaccgtcttgggccggccggcccatttagctcggccggaccgccccaattctcttgggccgcgccctagccgcccgagaaaagtctattttccctccctcttttcttttcttttcttttcttttccaaaaaggatttaattaaatcattttcctttagaccaaaaatccaataatcttagaaattcaataccttcccaaccgtaaatccatttgactccgttcagcttccaaaattcctcaaatctcgagatctatctaatggcacgcttagaggtcattattagggcttcattttcgccgtttgttgagttgtcctgtttcgcgtgtagttccggagcccgaagacccgcagtgcgaggatttcgaggatcaagctccagacctcgagcaaggcaagccacctttgaacatcttgagcctatacttgaaatttaattatgttgcttgcaaaatattatgcattgataggatcgcacttaatctgttgtcccgtctgcaaggcagattagcggacctacctagtttgttgcattgatccttcctttgttaattgttataccatgttcccttgtaaccacccagttgcgcctcggaaatcgtgcaatctgtgcgagtaccaaagggcgccttcaaatttaaaatctgagcaacttcttgggtaaaacttaagttttacaaaagacttggaaaacccgacacctgggtcggtgcttgtgaactaaatgaatttccaaaaccgcggaccggggaacgtaccgggtgtacggttttcccgttctcgcacttaaggaccgattccttggaatttcatccaaacataagacaagtacgaccacatgggtggaatgggacacccctggctgagtaactagcttatcaggggagccttgatgtcgagagacatgtggattcgccggggtggtgtcggggaggaccactgggcttcctggcacagtatggtctgggacctaacctgttgttggtctgggacccctctcgtcggcatatggtaaacctgtgtcggctttcgaaatgccttgtcatgaaagcttggaggtctcccgacgtggctgatccccacgggctgggtgatccgggttagtaatgtcgtgtgggtaaagtgtaccccctctgcagaggttaacaaactgttcgaacagccgtgcccacggtcatgggcggatgtgaggtgattcctagcgtagttttgtttgactactgcttgtgaaattgctgttgtggaaaggggttcgctgtttgaaaaatctgcagctgatgggatcagctaggcccgggtggccgtttgaaagttgttggcccgggtggccgtttgaaaagctgttggccgggtgccaaccttgttttaaattttaaagactgatacattgcacatactccgaccggtcgagacgcaccgtctcaaccgtgttgtttgagaagcactcacttagttgtttttagaaaaagagttcaaataaaatcaactgcaaaaacaacagcctttccttgaagcctgcattaaacacctattttcccttggcttgctgagtactcccgtactcacccttgctctatataaataaacccccccagttgctgaagaagatgaagcggatcctgctgatgaggagttctttcaggagcaagccggctacgatgagttttagggtttcggcctagttcccaagtcgcgcctgtgttgtttggtccaagtcctgcttccgtttcccttttgtaatacagttgtgagctcgggatctgttcgtagcccaacatgactgtatccctactctataataaagagaccgctgttgctgtgatattctgtctccctgtgataccagcactgtttcctgggactggtatcgatcaacaggttaatttggagcgtcacgggctagttccggtcggtactagttcggggcgtgacatttatccgttctaatttataaatgactatctccgttctactcgtgcatggagtttggctttttaaaggccacgcggcgtccttccattttcctttttcattgaattggagaatcaatttccttttggtgcataaattgatttcgtatcacgtggacagcattaatacgaagcacgatcttcgttgaaaaaaacaaacagcacccacgcattgagcaacatagaacgtcaaacactctccatcgaatatggcccgaatatataaaacgtcaaatatatactcccttcattttaaaatttaaggcataagtaccattatctcaaatactaagaaacatcctaagaaacaactattatcatctcattatttaaatcatcctaataaatacaatcggtgcacccaataaatcatcctaataaattcaatcgatgcacccaatagaataactttggacattaatttaaaatgatgggagtagtgcatttctgagtgtatgagcgtgcgaatgaacgtagtgtgcgtgcatctatgtgcgtttcacataatcaaaaaatcatcaaagtgtccggatctgacatcaattatggatttgattttcggactttgctgccaaatagggccacaaagtcatatatatatgtattaatggcctcatcataagtacatatatcaaacattccatctaaaaaaatccacttattaattatactatcttaaaacactcctcacaatcacattgatgcgtgtgaaatagaagtggttggaagcgaacagcttaagctaatgatacagaatttaaggaaattcacttgtacttaatttactagaagcctcaattactctctacctaatctcacataaaaaatcccaaaaaagaattgcatgtgatacgcacgtctatttagtcaatacactctacaatcggtgcacgttaacatgtaatctgttgcattgcatgtgtacatacgtcaagttcagagataagtgccacgattgattgcatagctgtatcaatatcgagcacaagtttccccctccccccccaaaaaagagagagagagagagagagagagagagagagagagagaaaagattatcttactcgagcagagattactcgtacggctcccctctgactagctatcatctgacgtaccaacgaacttgaaatgagtaaatctggaattacctcttacaaaaagatctgaaaagataaaatgacctaataacatctatacttgagaaaatgagaacaggtttatatcgtagtaaacgacctaattacaacttcacaagattaattagttgaaaaaacattaacagaacaaggcagaatttgacataaaaacggcacgcaacggaagaaaatggtggcagcttgatagttcgatatcaaaagtatatatgcgtgcaaaacagctgaccaagctagagtcttgacaaaactacagtggcaactaaaaggacaagacgagtattgcattggcaaagaagtcagaactgataggaatttataaatgggaaaaaccagtgcttcaaaacttccaactgtgttgagctgaaaactgtatattagtgcactcctctcgctctaaagaaaaactattttagtacactattcttctgtaagctctatcagccttgttcaggcttaccatgcgtaaaccaccatcacctcttaccattgaaccagattgcgtgagagaagatgtaccatcgtccatcatggaagtagatgtgggcattcggtctgaccaaaaattttaatctcagtcttcggtctttcgaccattttggtctttgaaaagtgaagtccgaatttcaacgcaaaaagttaggactgacaaattcagtctaggtctcggtcctaaccaaaattcaacaacattttcatatatgcaaagaaataatcaaaattttcaacacaaaaataaaaaaattcgtaagcacgtatgagtaaagactcttattaggttgcatgcctagaagaaatagggatgtgaaaattagagtttaatcctactaaacctagtggattataggttgtatttagacatttttttaattcggtcttttcagtctattcggttatccgagtatactaacggaattgatgtgaaaattagagtttaatcctactaaacctagtggattataggttgtatttagacattttttttaattatgtcttttcggtctattcggttatccgaggatactaatgaaattgatcgaacaaatatcgatctttcacttacctattaggaccggctttcttggtctcggtatttttggttgggtctttttctacccaccgccctacgtgaaagcgtggaccaccaccatagcgacggcttggagtccacatgagtacatatgggttcgcgaagcctaatcaattactccggccttttgggcccacaagtaagcctattagttgctggattttgggccgggccatgtggagttcagttgaaggttaaaacattttccttttttttttccgccgtagatttgaaagtgaaacaagttttaaaaatcagtgaacaaatttttgcaaatattacagaaattaatttaacagtcctgaaagattttatgtatcacacgttgcatggccacaagtacactcgtcgtgtgcctagagatcgtcggcgacacgccggcacaccctggcctccttgtacacccttcccggccggcagaggtatcccttctccggcgagcagtgcgcgtcctccgagcacacgcacagcccctccagcgcgcacccgtccctcaccacgctcacgccgccggcgccggcgacgccgagcaccttgtcgctccactcgctggagaagagcccctcggggtcgtacgcccgcttcaccctcatgaacgccgcggcgcgcgcgccgccgtacttggcggcggcgccctcgaacgccgcgttctggttcttgccccagtgcgggacgccgccgtacttgcgcagcgccatctgctcgacctcctccaccacgtcctcgtgcagaagcggcgtcgccgggtcgcggctccggtagtaggtgaggtcgaagtcgacgctgtcctccggcttgccgaggtgcgccgccgacgccctgacgtagcgcatgaggacgccgtcgtagagctccacgccgcagagcgcgtccgggttgaggtcgcgcagccgctgcacgtcgcggatgaaggccgccgccctggacagcggcacgctgatgccggactggaagaagaacgtgccgtgctcgacgcggggatcccacgggcaggcggtgaggaggccgtcgtcggcgccggcgaggcaggatcccgacgactggatgcggttctggtagccgaccaccgccgtgccggggaacgcgccgagcagctggccgttcctcgtcaggccgtagttgcgggctgcgaggatggagttcgtcgtcgacgccgcgaggcacttgccggcggcattcccggtcgcttccaggccgtcctcttcatgcaacaacaaacatcaagtacatcatgtcatgtcagcaatggtattggaaaaaatggtgtacttgttcttgggaaagtgatttcatccctgaaagggatatcccctcgtttcgtacatgtcacctaaatagtcatcgaaaaatttgaaaaaaattggcaacatagattaatatgaaatatatcactccacaaacatacaagcttaaattcaatttttacaagttgtaacaaaaataacaaatatagctgtgaatgtatgataactattttcagtttaatttgttattttttttaacttgaagaagttgaattttgtcttgtatatttatggagtaatatatttcatattaatctatgttattatttttttaaaaaaaattaataaatgcaaagaatgagcacagtggatgcatgtatggtggatcacgtaccgacgagccttttggcctggatggcgagcgttggggtggcccggaagccgacgaaatcgtagacgccatcgcccggcgtgttgctgggaacgcggtcgtcgatccggtacacggccttgccatggccggggtaccagaggatgtcggcgaactcgtgctcgccggcgaaggcgacgactcgttccgccaggtcgccgtcgccgcagtgctggaacgccaccgacctcttgaacatcggctgcagttttagagtaacctgggaaatgaccccgagcaccccgagcgacaccttggcggcgtccagctccgggtcgccggcggcgagcacgcggaccttcgcgtacccctctctcgccggcgccggcgtgacgatcctcatgccgttcacgtactcgtgcacggcggagccattcccccacaccgagctcccgtgcgcgccggtggagaggaggccgccgacggtgacgcccagccagtacggcgagtgcggcagcgcgaggccggcgcccgccgcggcgtcgatcagctccgccagcgtcacgccgctctccaccgtgatcgccatccccgcggcgtccacggcgacgacgcggttcagcgcgctggtgctgatggcgaggccgcggccgtcgccggcgccggggcaggacagcttcggcacgctgtgcccgtaccgcgtcgccgccttcatcttggtcccggacgccgccgccgcggccaccacgcggaggagctcctcctccgacgccgggtacgccgcggcggccgcccggcacgtggaccggtccgggaacgcggcgtacgcgttggtcacggtgcagcgcgccgtccccgacgcgcaatggacgggatccgccggcggactggcgccggcggcgaggaggcgctgcaccaccacgacggcgacgaggatgccatggacagcgcgccttgctgtcactactgaaccttgcatggtttgttggtttgcttgcctcacgtcttcgcatgcagtcgaactaatgatgtattcgagataattaaattgaattggacggcaaagggggccaatgatgagcttgaattttgacttaatttgattagttttattatgtaagattgatttggtgtgtatcacgggtgtagtgcatgagtttgtcatgtcactcttctcagctagaggccggccaatctgtgagtgtttgtgcaggctatctgctggaaagcatattcgtctggaaataattcaaggttggtgatgattagacatcaagcctagcaagtttctcacttgagctatgttgattttatgctttatgtttcctttcatcaattaatcattggctacaaaatatatttattaattccatgtggtatgcaagtatgcaccaaatgaatggacgtgatatattcatcaaaaattatatcgcccatgtccgtttttcattgcaattaatggctaataaaacaaacccttcctagtatgttttgcttatcttaagattctcgaagcttacgttttaaacacaatactcgatctgccttaaaatatagtaaacatagtattgaattagacacatcttactacactacgaatctggataaactctacatttttttaagtattaggatgatttagtaatatgttgttatattttaggatagatggagtataagtatagaggaggggaaaaaatcatgatcaaaatatgtcatccttaacagagaatctcaaagttttgataaaatttatgattctttcgatcgagatgcaggacatttataagactgtctcaggatttcattcaaaattctttaaaattcctacatttcaaatggggccttaacgggcttaggccctgtttggctaatgggatagggaaatgattacccacccaacaaaaaatatctttaaatcctagccattcattctctctcttccatttaatacacttcattcatttctcaattctaatcccacccccgatttcccattatccaatcacatattagtgcttggcaagcgggcaatacagctgtaacagttatgagaagaaatggcgggcttccgcaacggtgtacagtttcggcccactatgaactaggcccaaagattataggcccgtgacgtccctgcccggttgcaatccaacctcttgtccaatacaacaaaacgacacaaggggaagcagttcacaattccggtctcctccatgtcgacgtcatcgccggcgatggcgccgccgtcccaacctccgccgccaccgccgtcgcaggagctcgacctagacgccttcctcccctcctcccccacctcctcctcagtctcggaacccgatggcgacggcgccgccgatcaccgccgcgccgtcgacgacctcctcctcctcctctcctcctccgactccgacaccgacgagccgcccgctcgacctagccccatcgcccagctcaaaaccctagccagcatccgagccccagctccgtcccctaaaccttcgccttccccatccccttcgcccaggagatccacatccgcctcgccgtcggcgacgctctcctccctcgtctcgagaaccttctcgaacaacgccgcttcgtcttcctcgtcgaagcctctcccttcgctcttccgcggcgtccggcccagccccaagcccggcgctgctctcgccgccgccgccgccgcgtcccgcgctgtcctcaccccccatgccgctgccatcaagtcccggcgttccgcctccgcgcccatcgagaagcttctagacgaaggctccggttccgaagtctctgaggagtttccttccgctggaaattcggaagcgggagtagcggagaagactaatgcggaagggaatgcggatgtgagcaaggaagctaccagtgggagtggtgatgaagaattggaagcggacaaacatggagaagaggtgcggttcgaagaaaaaactgagcccactgagtcggtggaagaagttgctgctgattctgctgttgccgagaatatcaacgagcataagcaacttggaggtgaaagtttggcagaaactgatcgacctgcggatcaaattggtctcgatgatgaggaacatgtagatgaccgaaccgccgatgaaaatttagtagaatttggtgatgttgaggatctggttggggctgcttgcgaggaagatgttgatgatgagcaggaatctgaaagatccgaaacctctgtggaagagcattcggaatctgagagcattattgataaggcaatcgaagagaggttggagattagcaggaaaactgagaagattgtggagaaaaggcctaagttgtcaatgaaaccactggagcaggcggaggagcttgagaagaggcaggcttctttcgggcagcactgggaggaaggagcagcagcacaacccatgcatctggaggggattggaaggggccaaccagctattggttacatgcaaattgaggttgacaaccctataactcgtgccatgtcctcccagtcatttggacaggaccatggctctccccaggtgatgacagttcataagagctatatagcattgggaatgtctaaaggatctgtcattgttataccaagcaaatattccatccaccaagctgacgatacagatgcaaaggttagtcgttggtactgttgcgaataactattgtttagttcatgctataaatcgaatgttgtttaagactattcagtattatgtggactcaaagatgaatatttagataacacttagtgctagacatattggaagtcttgtcttccttgagttgaaaataagtatagctatcctatagataggttctgaagtttcataaacaatgttaccataaatactgattttatgattccagatgcttttcttttggaaccaaggtgagaaaactcaatcatcggtgactgccatgtgcttcaaccaacaaggtgatcttcttctagtaggatacaatgatggccatatgacaatctgggatgtacagaaaggtacagctgcaaaagttatatatggtgagcacacagcacccgtagtgcatgcttgctttatccgccaatctaaagccatcactggtgattcaaaagggctagtgctgttgcacacattttccattattccagtaatcaatcgcttgaccatcaagggaacccaggtatggatcattatttccaacgtgtatacttacttgatcccctactgaatatatgtctggcctgataaaagttagctacaattttccagcgcctttttgacggaaacaccggaattgtgctctcagcctgtcctcttctagtggatgaatcatttggttctagcaactcttctacccagggaaacctgacaacctcgtctggtggtggtcttagcagcatgatgggaggtgttgttggaggtgtagttggagttgattctgggtggaagtttttcaatgaaggttcttctccaatagaggatggtgtagtagtcatgtttattatgcaccaacatgctcttgtggtacaaatcatttatataattctagaagcattttataacttttttgccatatgtatgtgagctcattaccatctgaactctttcttagttacaatgttctgtgtttcttctgttaggttaggctccgtaccaatattgatcatgttgaccatattgaaaccttctctagaccagatggagcacgggagggttccattgcatatgctgcatggaaatacacaacatcctcgagtgattcaccatcaattggtaagattaggtggccttatctgtgggcattgattgctgtctaaattattatgttgtattttcatggactaatatgacaacaccatagttgaagaacaagtatcatggcttgcacttgcatgggatcgtcaagttcaagtggcaaagtttgttaaatcaaagatgattaaacataaagaatggaagattgatagtgcagcgattggtgttgcctggttagatgatcaagtatgctaaaagctcactcttccataatccatttagtgtgtgctctttttttaggtgtaaaatcacatcactattttttttcccagatgttggttgtacttaatttgcgagggcagctctgtttgttctccaaagatagcaatgagcttcgcaggactgtatttgttcttgatggttatatcttcgatgaaagcatactataccatacacatttttctaacaggtttggcaacccggagaagcattttaacaattcggtagcagtaagaggtgctacggtgtatattcttgggccaaatttcctcacagtttcccgacttcttccatggaaggagcggattgaagcactaaagagagctggtgattggatgggtgcactggacatggctatgaaactttatgatggccagacacagggtgttgttgatctcccgagaacagttgattctatacgagaagccataatgccatatttagtagagttgctgctgtcatatatacattatgtatttgaatacatttcaattgctttgtcaagccatactggaaaagggggtgcatcagatggcctggtagatgctgataggtccctgctgacacagagagaggaacagtatgcacgtgtagggggggttgcagttgagttttgtgttcatattggacgaaatgacatccttttcgacacagtcttttctaagtttgttgcggcaaaaagtggaggtacgcttgttttaatttgctcacaaggactagtaacctttccttttggtttacctctgaagttgtactttgttcatgccttatttttgctaaatacctgtggaagttgatttgcagtccttccttgttcatcgagtgtatctagatcttcttttatacttactgcacttccttaattcattgcctatttgtttgcatatgtcttgtgctggttgattagatagtgcatgtacatgtttttgctgttaaattgctgctataacttgaaaaggctgacatggcatcgatggcaggtatgtttctggaggtgctagagccctatatattgaaggatatgcttggctctttgccacctgaggtgagcaacatcaagggtttactaatgttaacacagaagtcttcaaatgaatatacatttcctccaatctgatttgcagattatgcaagcactagtagagcattatagtagcaaaggatggttgcagcgagttgaacaatgcattcttcatatggatatttcttcattggattttaatcaggtatacataatttgcatttaaggtgtaagaaatacatcgcttatcacgcatgttctgttgcatatattgactgataaaatgtcatgcctcataaaaattttcaacttcttttgtttccatcaaagtttggaattcagaatattgtgttgaacaattataaggctgactcaatttgttatgcttctgttatattcaggtagtccgactgtgtcgtgaacatgggttgtatggtgcactaatttatttgttcaaccaaggtctgaaagatttccgcacacctctagaggagcttttatctgtcattcagaacgctagtagaaaagaaggtgcttctacttggtatgtcgttttgtggcaatacttgtctaaaagcccataaaattatgttcataaacaagataattatgtgtactgtgttcttcagtttttggtatgttagatgagcatatttttattattctgaagttcctgataaatatgtgttcaggaaaaaaaatgatttgatgaaccttagtaaaccccatgatcataagttattttcatttttctaaaagttacacacatgtgactttaacatgatagtttcattatcctgaagtttctgataaaaccgtgtttgagtaaattgcattaatcagtcaaataatagcattgattaccttgctattatttacacggatgatttagaatgcgacttagatggtcttgattgcctgaggaaaaaaaaacctttatgcatgagcatgcacaaaatggctgacagtatgtaacgacaaatatttgcttctttcaaatggaggcaaggatgaacaatactatgtggagttgtggacttgcttggttttgctacatactcaccattatacttttgtaagaccttactagtactgcacatatagctaatctcttaccctataattattctttgctgaaacagctacaggatgcttgtttacctgaagtattgctttcagggcttagcatttcctccaggttagcgtctatatcatttgtgaaaaacaatttactctcatgaattaatgctaggttagtagttggaccataaactatgttttttcctgtgctacactgctgtgtcttgtgttaggcctggaaacttgtgaattgtaaaatgctctaataaaactatatgctaaaatcttaactactttttttgtaaaattagagaattcaagtctaccatgagtaggccttttgggtctctctaccatgagatgtaggtactatgtcattctcataaggatgtctacttgtttcccatcaagattacttgtagaaccaggaatacacatgaagctgctgtatagaatgttcttatttttttaaaaaaaaatattgatgagatacttccacatgatttatttttcagggcacgggacaattccccaatcccgccttcattcagtacgagaagaactattgcaatttttgcttgaggagtctaagacttccagtactgatgtatacaagagcttcaaatcctccagtgaaaaatgcccaaacatatgctatctactatggatggatactgaagctgctttggaagttctcaaatgtgcctttgcacatgagagatttgaacctagagacaacccatctagtactcctgatgcacgtgtctcagaggatggagacaatattaatattggaagccctgacagtgaaaatattatgttacaaaatgtggtggacaccattgtggatattgttggtttggaaaatgaggctattcactcaattgttattggagcggctgagtcagaaatttggccttcagagaaggactttggttatctaatcgagtttgtgtctttttttgtttcccacaaaagggcaaaagcatctcaaagagttgttaggcacatcctcagatatcttacttcatccaatatcctgtcatctgatgataagaaaacaccaactcaaaaagaaaaggaagttcttcagctcttcgatgcagttcctcaaactgattggaattctgattatgtgttgcatatttgcttagacgctcattttcaccaggttcgtgaacattacactttgacagttgaattctatgctatgggctatggcacacgctcacaaatgccttttagtttatgactgaataatcttgttactgtacaggcttgtggattgatatatatgaccagaaagcaaaatttgcctgctttagaaagttacatgaaggatacactggaaccattccatgcttttatcttcattaacaaaaagctatccgaattggccgattatgaagcttcgtcatttcgttcctcagtaatatctcattttcctgagctagtcaagctaagcaggtgaaattgataattcatctaacaagtagatcacatattcgtcaactagattcatgcctgcttgtttgtctttctactgaatgcactcattttcttccctatgcctcttctcagggagtgcgcttttgtcttggtcattgatcatttccacgatgagatccagaaaatattatcagagcttcattctgatcaccacagcctctttcttttcttgaaaactgcgattgaagtgcacttgtcaggaaaactgaatttcagtgaactcaatgccagaaaaaatagcacagttgaacttcaatactcatcccgtgaacttgaattttatatacagagactttcaaatcttcccaagttgttggaccgcaatcctgttattatgactgatgagattgttgaactctatctggaggtaaatgtattgatttttttttttagaaaccaaatatgtcgatggacttttcaactgttcaggtcttaggtctgattgtttgttccaaatgaaaagagtctggtgaaatgtcatggctggaaaaattgtgttctttatggccacatctgctgtgtctctgtagagcatagccacaggcagtgtgccaataatagaacatgaagggtaccttgtccatcatattgcacatggtggtcaattctcttgaaggttgattgtcttatggttttgtagagctttggagtctgattacgcctgcaactgtccatgaaatcagtactttacagttctccattttgttgtgaatattatagttttgctttgtttttttgtcttatgatattgaaaattctgatatataaaagtaattgtgtgcagtatgtaattgaaattttgtggtgatcacaacaattttgtgtgttatcttcatcctaactattactaaaaaaaaaaatctttcttgcacagcttctatgtcagtacgagcgaaggtctgttttgaagtttctggagacttttgacagttacagattggagcggtgtttgcatctttgtttagattatggggttacagatgctgctgcattcttgcaagagagagttggtgatgttgggagtgcactggcacttattctagcaggtcttgatgagaaaatcaacctatttatttcttcagtggaaaatgctttctctgggattgcatcaaaaagtatatctgagatagagcagccagacattgttctaaaaatgagtgaggtctttcttttttttctcctgctcatttaaatgcttgcttggacaacctccgttgtatacatggtaagtaggtaacatattcaatatttttttattttgaaggctcatcctgtgcttgatgcattacgtgctgccatcggattgtgtcaaaggaattcacaaagattgaacccagaggagtcccagtccctttggttccaactgcttgactcgtaagttatgctaacatattaatactacgttacgttattcatatttataagtttcaaatataatttttgtcatctcagttgctggtttgttagtagcattttatgatgtaagatttttccttgttccttggaatatgaacctgtgacatcttgcaagctgttagacttctgttctaccccttctcatgaaaattgtaccgttcagttttctcactaggctgttagactgctgttctaccccttctcatgaaaattgtaccgttcagttttctcactaggcatgctcttaaacacttatagggagttgttaccatgtatacttcagatccaaatatagagggtaaattcaatgtccacatacataagtgtgcattgagagtgttgggcatgaactgatgatgctgaattgtatctattgaactttttctacagtggcctcaatttgtgagtcataacagatagtaagcatgatcagtgcctttgtccattgtgaattcagacaaaaaaaaaatcaaacaaggccttaattttttcttatgataaattttcattagattaattggcactctcaaaaggatataatcaacctataatattggaattgcataaggctttctttacagtcgtatgatttgtcatgtttgttgcttgctgtggtcatacaaagatatctgtcttgtgttctgatagatgtattgacatcaatgttgttatgttatcaattcagcttctcagagcccctgaaaaaattgtatggaagcaaggatgtaaatggaaaaggtgtcaggtctaatgggagtgaaacatcgaatagacagccaaaggacaaaggattctcacgaaaaacaaggatttcagcttatcagaggtgcttgaatgcactgcggagagtattttcgcagtttgttggagaaataatcgaggcaatggctggacatatacccttaccagcaatcatgggaaagctattatctgacaacaggagtcaagagtttggtgattttaagctcgttatacatagaatgctgtctatgtatctttatgaaaaaagaatactggtatgtccatattgatttttatcccatacgcaatttacttgctgctatagcagaccagcaatgctttaggcttttccatgctgctgtaatgtaaaatcattaggaaattcctgaagtacacatcgcttaaatgatcaacagactttagtgttgttttaaattgaacgcttgtttgctactgcaattgctggggtaaatgaacttttatattttgtttgatagaaaagagtttctagctcccttgatacccttttttagggaaacaataggggtggaccctattgaagatatatatttcttctctgatttcttatgcacctgcctgcaggaaacagccaagtcagtaattgaggatgattcattctacaccttgagcttactaaagagaggggtttgccatggacttgctccacagacttttgtatgttgcatatgcaactgctctctttcaaaagaaagtgctgtttcagcaatacgagtattcagttgtggacatgcaactcatctccaatgtgagtctgaacaaagtaagtcatccaatagggattccaaagatggatgcccaatttgtctttcaactagtaatacacaagcccaaaacaaatcacctatatcagagaatgggcttgggaaacattttggggctgaaagcgaggtatcacatggcacctatcatactcatgaaacagatcatgtcgacagatctcgtgggcttcagcagatgtcacgggtaataatatctttccacttatcatacatatgtcaactacatccaaaagtttttccaatgagtagaactgatttcagttatacttggaagccttgatcaagttataaccttgtactcttgttgaatatggcaatctactccacttttatagtattttaaatttattactgtttcatctaagctgatacgttccaagtgaacgtggcctacaggatagtactgtaattctgtaacaaatcgattctcctttttgcagtatgaaatactgaatcatcttcagaggccacagagtttgcatatagaaactgtacctccattgaggctttcaccaccagcgatatatcatgaaaagatacagaagagaacaaccacgatgggagaatccagcaagcattcagttagaactgaaaaaccccagagaatatggcaaatgaaggaaccaagatcaaaaagatcagggaaccgagttctgccaaagtcaagcatgttgagtgagtttgcgcttcacattgattaaataaataacaatggcactctatgtactccattttgaattttgtttgctctatttatgtttctttattcttctgtaggttctcagaataatcaagtgcgatagtgtaaatataatatggtatgaatttgacaattcttaaaatggtaagtggtaactctgttggtataggttttttgtctgttttttctcatgtatggagtcattattgcgattaatctttgaatccattcaaagctaattcgacattttgtggcctttggaaaaccatgtcaaatgtattgcttagcaaatcttcatggtcccacagtgtagcacagcagagcacaatgcaaggcttaaactgaacgtctgaaccttacatttttctgtaacttaataagaataatatatcatctatgttaaacctatcagaactatttagggccctcatcatcaccatgatcaatagaaaatgtgagcagaggacacctggaagttggaaatcaatttaggcatgcaaaaatgaaagcacgaataagctttgaaattgctagatctggagtaaacttgaaaatagatagtgccgtctagatttattcgcatgcagtgtttttgaactataggtggaatatcgatagggtttccaattcctattgtactggtttatacacgctgcaatcattatggatttgctctatttttctttgaagtaatagataatgagctgttttttgggttccttgctgaaaccagattcgaactgatacaaactgatttggatcgagccatcatgtttcaactttcaactgatcattgatttgccagtgtggttgtgctgctcttcctttgtactcaattctcatcttggtgatgcattaaggctgtttggagtagtgcaattcttctcccacggtacttctgttgaaggtcactatctttttttttctcttcatttggtcaatgtttttcttttctaatctcgttatctttcagctggggagatgaataccagatctcaaggcaaaggcgggagcggagaagggcaactagatcaggtgaccctgagaagctttaacttagaacacaaaaaaactaatgcgatagaaaattttttggggggcaattcatcatgaagtatttctgtacagagcgaacacgtgatgacgccatccttacacttagcattacatgactttcttgcgtttcgacttttctttttgtgtaaaatgtgaagtacacaggaactctgcgatgtatagcatatgagacattacatgattttgatcaactgagcaatgatatcaacactggtagtacatatgcacagtgctctgttctttatggatgtgattgatagattatggacaatcgtttatcggtatgaattaaatattatatattataaacctaaaaaatagcttagaacgagttagctaagcaatgatgatgatgtagatttttttttttgaagtggtagcttatgatgatgatgtagaattttttttttaagtggtagcttgccagctgaggtacgcataatctatactccctctgttctaaaataacttaactcaggatgggaacaaagattaattgtactaggatatatcttatcctatcttaagttgagttgttttttgggatggagagagtaaaacttgtcgttgctgcaaaatattgttcagcgttgcatcttgtgatgttttcccagcaatgtcatttttcatctcaaaacaacaagaaacttttgacgagatgatgaatgatcacacacacacacccaaaaaaatcgcaatcaaaacaagtcttgcgggagcagcactggcgtgaagattgaacaaataaacatgcatttatattcgattgatcagcatggacttcatcacattcttcctagcgtttataaacaggttgatttcctctgaaaaaggggacaaaaatcaatggaaaggctcaaagcacatccgtttataaacaggttgattttctctgaaaaaaaagggacaaaaatcaatgtaaaggctaaaagcacatcgtcttcgtcaatcgtcaccgtgcaccgctcggttttacactttgatccattagacatcaaacctttgaacttccaaaatctacatgtatttcgaattcatgttagaatttgaaaattgtatatgaatttgatcgaaatggtgtttcattcgttttcaccattacaacatctcgattctgcgtaaagagcaaaagtaaatgtttatatatgactttgcgagtcctctgatttactccacatagtagcagattacaagaaacaaaggctccacgtaatatatagctggaattccttttccaaatgtaaaagtacagattttttactccattgcctctctttctcattatccaacagccggcgttgtatatacatcgaagtccttcatctgccctcaatggcatcatggcatgtgccacaggccaatgtcagccattggatcatcatctcctcctcaattcctccatgccaagacagtgaatgtgccagtgttcatccaataagcagattggctcagaggattagtgacagagatcaggtaatgctacaatgtgttcctctgccctacaaatttccgtgcaacaccgaagatgagagccttggtcaacagcccttgatcaagagtgcaagccagagcaacagctccaccgagcacaaggaaccttgctactcggtttttcgcgggtttctcttctgcttccacaatatctgactgatcgtcgttggattccaatccacgaacaaaattgtcaccgaccttggtattgatatgcgccatcaaggcactctgagacaatggctccccagcagctctcgctttctgataggcccgaagtccaggttcgattctctttacacacccccacattccctgccgaatgccaatctttgcaatctcatagggaatacccatgtcctcatggtggaacaggagaacctcacaagccgtcaatccactgttccctcttcttgattccactgttcaaagatcagatgaaaaaaaaaaccagttaccaaactgcccacaaagaaaaaaaatagagaaatatgtctactcatccatttctcctcttctgcgttgttctttttttggttcagacccattactcaaaacagtatacatttcacctcataaggctcaaaggaaaacagagtagtcaaggaaattggcttacctggacggatgcaccagcttgaatagtatacatctactctacgaggtttgttacgacgtgggatggatgagcatggcacaccctgcacaatgcacaaaacacatacatgtaaattgctgagctggtcaactctgtgttcacatgcgcacactagtgattcaagcaatgcaagttgaacttgcctaggcaaaactatgaataatcaacaatttatttttactctgtaaaaaagtccatttaacctttgttcaatggtaatactctctttagttcagagatacatcttactgaatcactttatgcagggtaaatatcctaaacaacaatcttgaaccaaggttaagtcattaataagcatgaataggcctcgaaaagaaacctccagccaaaacaaaatgtgtgttatttcaggaaagcaggccaaaacttctgaaatgtgacctgagaaatgaatttaaagcaagaagtgatcatatgttctctaatgaggtacagaaggcatcgtccaataacttacaacagataaccagaactgatatgtgacatacttctaagtttgacaatgatgtaggaaattagcaactacttcctagtcccaccttgctttgtacttggtggttccctattaaatatatcttaatgctcatgggtgttcccactaaaaaatggagatttgagaatctctgctgtcaacaactcaacattaagatcaagacatcaatgatgttacaagtctatattcataagtgtgttccaaggatggagaaaatggcctgaggtcaacatcattagataaatatagtgtttcaaaaatatcggcacatctgagaaacaacagctggaatttctatatgtggcctctcagtatcagaaaaggtacagttgtgcagtacgcaaagtaatgaattcacctagctcagcctattcttaacagaacagagccaaggaggcacaactgtacagcataacttactttgagaggatcattttgttgcatacgcgttaaagcaggaagactctagaccgaaatccatccaaagaagttgcatatatgtttttgaattgttggcaactgtagtgtataagtttgatgcacataaattcactacaatcagatattcatatgctaatgatcaagtgcaagtcctcctataacccccacagacaacacccaaaatattttttcaatgtttgtttttacctttgtaacacaatagtatgcacctcccagtttccatatccgacgagcaatgatgtactccctgtcactacaaaagaaggggaactgcaacagcaagaaaaatgcagaggcatgagaacactcaaaaggcacaaacagaattcagtcgatttactatcatgtcaagataatcaaccttgcggacccaatgcactttcatcgtgcctgttgtctgacactcttccaaagtcttatgatagataagcatatcatcccacttgttggacatccggaattgatcgtcgccgaagaagtccctcacctcctccggatttgcattctcaaatatagtactactctggtattgtggaggtccagtctgattgcatcaaaagtatcattcgaggactagtgaggattagcattcaccacttcagatcaacaagaagcaaagaattcagtccactgaaagtggaattcacctgtggatccctcctccatgcctggtaggtcatggcgggcagcgccttctccatcatcttgatccatgccgggccgccatccctgccctccactagcctccagaggttcatcaggtcatccttccccaccgccagctgctcgttcgccatctccgacgacctgtcaaaccaagaagcaccgacagggtcaaagacccgctccaatttcgcgcaccaaatccaccactcaacgatacggctttgaccaccgcaccaacaccacgaacacggggacgcatttcgccgaacagttcgtgggcctacgtacccaagcagggaggagtcgtcctcctgctgcggcggcggcgccgggccggcggcgccgacgtactgcgcgagcggggcgcggatgcgggcggggagctgggtcctccagaactccagcgtggcgaacgtcagcggcgcggggtggctgtcggcggtggcgacgaggccggcggcccagcgcgggcgccacgcccagccgagcaggaggccgaggagcgcggcggcccagagcgggccggccagcacggccatctcgcaggccgcgccccacgccgtcggctgctccaggaccctcgccaccgccgacagcacgtaccccatcggcggcggacgcggacgcggcggcggcggcggcggtggcggagcggcgtatcgggcggggggaagaaaggaatgggctttgtggcctatcgagtcgtggaggggattaaagactcgatttttatttttattttttttctctctctctctcttttattatttatttatttattgggtttctttggagaagcaaaaggtgtggtgtgtgagtagtgacggggggtcattgaggtgtggacatggtgcatggactttgcatctccctatcacctttcattatttttttttcttcttttttaaggagattttctaaaggacatcttggaaggggggtcattgaggtgtggacatgatgcatggactttgcatctccctatcatctttcattattttttttcttcttttttaaggagattttctaaaggacttcttgggaggagtttagtactagtttaggtcttcaatgtagatgtgaatgatttttatttttgagaaagactaatgaatggccccatgggggtgagctgagatgatgttttaacaaagcaatggtgggtggtcaattgtttatatttcctagaagagtttagcttttcttaaggtgttggttgacccttattaataatggttttagtcttagttgatttctggttgggatgtcattttcacaagagtgttgtgctctcattgcttgttccttgaagccgcaaaagatagtctaaagatgtctaaacaattgaaaaaatgaagtacataagcatctccgttgagctaaaataaaaatgcatcatgtaccttttgctacaatgaaaggacaataagtactcactccgtcccaaatataagaaattttagttatatggaacacatcatattattatgaatgtagtcatatagtctatccatattcgtagtactaatcccatccaaccaaaacctcacatattttagaacggatggagtaaaccattacaattggatcgcatatgacttatatatgttttaaaatgtgacctttacaacttgagtgtaaactctttcaacagaagcgaaacaagaaaaatgacgatttcatgaatataatcgacttagtaacccccgtcataatataatcgactgatctacatcatagttaagtcaatccaatccaactaaacttgtgaaagaaatatccaaccacatactccagttcataaatatcctaagactcatcctccaaacccattttcctcttctcatagctcatcacgacatgtactagtactagtacctactggtacttattttttctattgaaatgatttttcagccattttttttcgtttgaattgatttttgagccattgaatccatgtgagagtggcatggacaaggtgtagagacgtggagggttgagccacaagtgataaggtggatttttccggatttggggggagaggttgggggcagcaccttccgattcctgagggggccaaatccccccaccaaccaaccacagcccgccacgtggactgcagctggcccaagatgagtggccattggccaaacacccagtcacccagaccagcttagctcagatcagtacaaaagctaggctactattggtccctgaacaactatgcaaattgatgattagccatcagctactactaattgaaagaagaatgaaaaggcagaggcttttgttactaattgatcgctatcatatcaccttcatcagttgccaaatggctctcctgtagctggtgtctactggacacctgcagagtgtagagctgttcttgcagctgcatgtgtcactctcctatcctgcctgagcctaacactgtttctcaatttttcttgtcaagctggcactgcgagtgatgtgtacttgttcagcccagaccatagttttggtatgaatagcactgttttatgtgatttgttttaataaaaaattcgtagggatagaggggctgatcagttcagctgggatgtagctgcacagccgcaacgctacagccctcctagcctaattctgcttgctgactcctatagctgcagcaccgctgcttccgtagctagctattctaaatgaacccagagtgaagccaaaatgtcagcaatttttgtagtgtatcactcattcactcagggtgtgtttaattcacgctaaaattggaagtttgattgaaattagaacgatgtgacggaaaagttagaagtttgtgtgtgtaggaaagttttgatgtgatagaaaagttggaagtttgaagaaaaaatttggaactaaactcggcctcacttaaggcattttttcatatagctgaatgattttgctaatactattaatggtataggcgaacacattaactattataatttttaaaaatgaatgttaatgctttttaataaattcgtatcaataaagctttaaagaaaatcacaccatatttaaaagccctatcgtattaatccattcttcaaatgccttataagtgagtgaatgagtgatacaaccctattcttccattcttcaacctacaagtttcatttttatgttaagaattcttcagtgcatatgattctttcagtttccatggtgtgtgtatgcatcatgcatgcatgctgagcagataaccctatctatctatatctagttcgtccttcattgtggtgccagcaatctggataagtgggggagtttggccccattctctaatctgctgatgatgctaaattgtagcacatgcatgcgtgtcaaagtgtcctgaaatttttacaatttggtcctttttaaaaacttattttacaaatagacccctggaaaaacttaaaccggaaatgatcctttttggggcgccagagtggctggcgccgtaccccaacatggcggcgccagccacactggcgtcgtgcccgtgccaccgtggcactagggctgtcgtggaggtgctgactgggcagaaagggggcgccagccacactagcgccgcccctcataccacggcgccagcatagctggcgcgcccctcctctgtgggccgacccttaaaccccgtgggccccaccacctttctcctccccactcccattttcgccattcccagcccgagcagcgagctgctgttcttctccctctctctccccctcacctctctacctcaaatccactcaatttgaagccgtttttcgcgggattttttgtggaaatcgaagagaaaggtagactccttcattcccccctctttttttcatttttattggttgaatttgtagatcggtgggtaaccctagaaccccttttttacccaaatttgtgatttttagcatttgttcttaggattggcttgttgtagtgctacatgtttgcaatgtactcattggtgtcatgatttttttaaccatatatgtggtaatgttaatttttggatggtttggttggatggatggatgaaaaattatggttgaggcatgacgaaggtttgggttgtatgatagagtatttgtaatatttcgatgtgtaatgcagtagtaaacttgttgatagttgtaggtggattaaatatttttttggagtagtagctttgggacaatttaagttatgcattggttataatatgtcggtttggactacgtttaggaatgaagatttaatttttgttgcaaagttacatttgattttttggtgtagatggatagacttgttcatgtttactacggtggtagagtggtggaaccttatgttggtggacatgttgagtttgaggatatgtcattgaaaaccattttgtttcccacccacccaactctagatgaactaaggtcacgagtgaaagaagttcttggatggaccgaggataatgtggagatttgtttttataggagatacgatgttggtcaagggcataagtatatattaaatgtgataggttagttggaatgggaagtttactttgatttggtaaaagagtctcagtttagatctctagaggtgtttgcatcaaagttagttcgtaccgtagaaaatttggatctaaacaaatctccttcttatcattacgttgagaagaattttgtgacatattattctcgtcgtggaggggtgcaagtaagagtgagttggtacgagaagacttggagggggaaggagagaagaagagacctttgcttggaaatgatttatgggaggcaggaccatcaaagagacattgcggtactgatgatgtggatgcagcgagggtgatgaaaagggagttagtacaagaggggcttgatctaagtgaacatttgtcggcgagtgttcattggtcgtcgtacggagtcaaccctgaatacccgacagaagtagcaggccaatatgtgaatccagatgattactttgatgtcgaattgagtggtggtcacgattctgtctcagtaaaagtcaatagagatgatgttgacgaggaggcaagtgttgagcaatatgatgttgaatttgctgaagactctgatgatgaccgtccattccctccacttactaataatgacaagttagcattagaggaatgtcgtgcgtttgagaaggtgtttgggaggaagccggacattcctgagtttagggacctaacacatgcccatggtgcactactagatggcggcatcaacctagatcagttgccagaaccattccaggtggatggtctcagaaagggtttagagttcccatccatggtcgcattgaagctatggctccaggagtacgccatcgtgcaccatcgtccataccgtgttgtcaattctgccgcaaataggaggtacactgttaaatgtgaaaacccacggtgcaaatggaaggtccatgcaactaagaggtctagtggcacgtggaggatatcacgggtaggtaaggaacatagttgtgctactgccgaaggttcagggagccaccggcaactgacatcaaagttcatagcaaataggttatgcaatgccataaaactgcaacctacactctctgcttctgcgttagctttgtatatatttgaggttttccagtatagggtgaagtatggcaaggcttggagggcacgagaggaggctatgaagctcatttacggtgaatggggtgaagcgtatgtctgtttgcccactttgctgcaagccattaagcagaggaatcccagtatggtctaccacatcgatactcatcctgatagggttgtcaacgttgatggagtgactaagaaaatttttatgcgtgcattctggtgctttggtccttccattgaggcttttaagcattgtaggccagtactagctatagatgcaaccttcctaactgggaaatacggtggtgccttgatgactgcattatcagctgatgcggaggaccaacttgtacctttagcttttgccttggtggagaaagagaattcacgagactggtgctggtttatcgatcttgtccgacgggttgtggttgggccgcatagggaggtttgtattatctcagatcgacatgctggtataatgaatgccatgatgactcctgttccaggattgccatcggttcaccaccggtggtgcatgaggcacttcagtgctaatttccacaaggccggtgcggacaagcatcagacaaaagagctcctaaggatatgtcagattgacgagaagtggatatttgagagggatgttgaggcactaaggcagcgtattcccgaaggtcctcgtaaatggcttgaagatgagttgttggataaagataagtggtctcgtgcatacgatagaaatggccgccggtggggttacatgacaaccaacatggccgaacagttcaatagcgtgctagttggtgttcgtaagcttccagtgacggccatcgtatcatttacgttcatgaagtgcaatgactactttgtgaacagacatgatgaagctttgaagcgagtccagttagggcagcgttggtccaccaaggttgacagtaagatgaaggtgcaaaaaagtaaggcgaacaaacacactgcaaggtgtttcgataagcagaaaaagacatacgaggtcacagagaggggtggtataacgcgtggtggtgttagattcggcgcaagagccttcaaagttgaaggtgaggggaactcatgttcttgccaaaggccattgctctaccatatgccttgctcacatcttatacacgtttatctgattcatgcaattgatgaggaatctcccaaccgaatgccgtatcagttctcttcaagagccgttgtgaacacgtgtaccaaccggggagactaccaccaccactacctcaatccgcgcgtccaagtactgctcgacactccatcaggatagaagtgcgtgaaagagttggtggctcgtcgtcgtcacgcattaagcaagggaggggaaaggggaaggcgccggctccacctagcgacgacgatgacgacgaggacgaggaggatgaggactacgtcgcaccagacgccgaggagatagacatgtcacagcttcccgacgcgcctcaggggacgcaacccacgcaatacaacttgcgatccactcgggcagcgaaaaagaggtaaaatgagcttaccattctcaaatgttatttgatttcccttattttgtttttaaaatgttttaaacattggattttcaaatgtaggtacactccgggctcgcaagcaattcggcgccaacggaagaagtaatttgtatgaagttaatctattggttggtagtatgacatatgtggtgcactatgtgatataaaatgtgatggactatgtgaggactatgtgatggacttttgacattgtttcatgtgtggaatatagaatggactttttgcattgtttgatgtgtgggatatgtgatggatttttggcattgtttgatgtgtggaatatgtgatggactatgtgaggactatgtgatggacttttggcattgtgatttgtgcaattggaacctattttagtctgtacgaatctgtgaattgtgatttgaattgcgaactgtgaattggtacatttgtgcaatatggatcttcaatttgcagggaggcaaagggcggcgccaaccaccctggcgccgcggttgggaagggcggcgccagccagtgccgcgaggcagaagggtttcgggctgggggagggcggcgccagctaccctggcgccgtagtccatgagggcggcgccagccgaggcccggaggcagaagggcttcgatggggggaggagggggcgccagccaccctggcgccgcggtcgggggggggggggggcgccagccgttgcctggaggcagaacagacttggcgaaaatttttaggggggggggagaaagttggtggggcccgcagaggaggggcgcgccagccatgctggcgccgtggtatgaggggcggcgccactttggctggcgcccccttcggcctagtcagcacctccacgacagccctattgccacggtggcacgggcacgacgccagtgtggctggcgccgccatgttggggtacggcgccagccactctggcgtcccaaaaaggaccatttccggtttaagttttctcagaggtctatttataaaataagtttttaaaaaggaccaaaatgtaaaaatttcagtcaagtgtcacctgcagaaaaagagctaaaacctccattatttatctgttaattttcgcatgcaacaacccatatgcatgtctcatgtgaagggacagcttagctagctggctgggctacctaaagctgcgtgttaattatcctaattagttagcccttgagtgtgctaaacgtttgcaatatgaaagtgattaagctatgagcaccaaaagagcagctagctcaagctgcaacactaccacctacatccttctagattggataacaaatattgataagctagatctccaatgcagtttagcccagctgatcactagcattcatcatctctttatcgacgttgcccataattgagaccacttaatcatgtgattcacaaggtaataattaattagtactagcatacgcgacgatgcggcttaagggcaagtttaatagtacagcccactactaacttcaattcatctatagctaatttaatagccaattcatacaatagttacttactatactattcatatatggtcccacctgtcatacacaccttacgtcttggagtccgtactgcagctggctacagatctgtagcccgctgatcttctctctaatcttttatctcattaaaatatgcttatagctggctaatacttcctccgtttcaaaatgtttgacaccgttgactttttagtacgtgtttgaccattcgtcttctttaaaaaatttaagtaattatttattcttttcatatcatttgattcattgttaaatatactttcatgtacacatatagttttacatatttcacaaatttttttaataagacgaacggtcaaacacgtgctaaaaagttaacggtgtcaaacattttaaaacggagggagtaatatgctattgtgcctgctctaattgttgtctatatttgcacaccaaccacccaccaattgtttgctggccatgcatatcatatactttgagctagagttcagtgatacacgtatgtacttccttttggaaatcaagaaacctctcgcctataaaagaccgcctatttaagcatattaatttgttggttgggatagaatcacagcatgcagaaaatgcacagctatatacaactccagcacatgatctttgaactatgactgatgtccaatccaatgcccattcttgccagagcccaattagtgatcgatctggatcataccccagataagaagttaagaactgaagctgtatacgccgcaggtaggacaaatcaatcatacgtgaatcttcagaaaaataaattgcactttactaaatgtttttgtttttcaaacgatgcactttactgagtaagagtagagaatagatgcgcccggcgtacaaaccaacctaattctgaaatggagtcctggctcatcgtttcgcttataaatatcataaacgaaccatcttactaatgattacaaaataatctatgagtaaaactttcaaataaactgaaaagaaaacacaccccgaatcaactcttcatcacatttctgaatttctgaatctgttcttcagaaatcacatttctgaatctcgtctttttattgaacgaaaatgctggttacttttggaaaaaaattctataggaaagttgttttaaaaaattatattaatctatttttaagttagttttagctaatacttaattaattatatgataataagctgttccattttccgtgccggatggatagggggccccttagagcaggtacaatgcgggctattagccaaccataaatatattttaatgaaataaaagattagagtgaagagcagcgggctaaagatctgtagccagctgcagcacggactccaagacgcaatgtgtatatgacaggtgggaccatatgttaatagtatagtaaacactattgtatgaattagctattagatcgactatagataaattagagctagtgggctctagttaaacttgctcttatggggaaacacccccttagattgtcaaaaactctaggccaacgcttctccagcctaggccagatccgagggccttgcatcatgccactgaacgagaatgggatcgtccgcgtcgtcagggaagcaaagcaaccaacaggcgccgccatggccgaccacctcgcgagcttcagcgtttgcttccggtttctcaccatctgaaattctgtggatgctgccggcaactggccttctgacaggtggtccccactagtcatacacactagcccagctgacaggtggtccccactagtcatacacactaaccccaactaactgagacatcctcaactgactcagcctccgagataagccgcgccgtcgccgccgcagaaaccgcaaaagccatcgccgccgccgccgccgccgtggccatggcagcagcatgctcctccgccgccttcctcgcctacccgggcagcctaggagcagggccccgccccctccgcctcttccgcgcattcgcggcggcctcctcctccgggtcggggagcaagaagaaggcgaggaagtccaagggcgctgggaacaagggggaagccagcggcggtggaggcggcaaggggaaggagaaggcgctggagccgccgcccgcggtgatacgccgcgcgccggctgggagcgcgtcggtgttccagcagccggagccggggttcacccccggcggcggcggcggcgggaaggggccgacggaggaggagcggcggcagcggcaggccaacgagaacgccttcctcctcgcatggctggggctcggcttgatcatcctcgccgagggcctcgcgctcgccgcctccggtaacgaagcttagttttatttattttttttcaattaatatattatcctctgcttacaattttagtggttcaacttaactgaacaacactagtctgtaattaacactgaatgtctgaacagaaaagaaatcgcgtttcagtaagtaatcattcagtaaatgaccacacctttctagtggaaatgctgaatgtggtgatcagtgatggaggaatcgtcacattttctgaactagtgtatgcgttttccattcctatcatgatatgttggtgtaatcatctgaactgaagtgtgacatgataatgatggtacacgaaacaaagtgaatgtagctttacttgctctaaataagaattttaagtagcaccagatttattatgtgttattataacagagttggagtagttatcaacaagtgacctaacttttttttaaaaagataatgaagtgacctaactatttactgaggataatctgaaatttagtgctttagaactgtggagcttagtgatctttgagactttgagccttatatcataatgttatgcaggtttcctgccagaagaatgggacagctttttcgtgaagttcctttatccatcgtttactcctacggtaatattgtttttgggcggtacggtcggatatggcgtcttcaagtacttcgaaggcgagaaaagcaatagctagatggctgcacaaaggttggactcaaatatattcatcttctgaattttggccctatagttctcccaaaagtttttttatcataggctcactgcctccagcaatcatatatctgactgctagttctgtatatgcctctttcacatcaatgccatattgccatctctgttcttatgatctttggaatctaaaaccttttttttctgcaatatcgtattttcatttcttctccttttaccttaccatagattggccatattttcatttcaatgtagatttggaagggaacatattgtctaaccgtcacataccccaatttatttgcaggtgagtaaaagaatgaggcgggttgaaacacgattagagagtaaatggttcatatttgccatggttagagtattgactattaccatcgtagctgcacaagacaccagtcagaggctttgcgcaaattgcagtgcgactgtgcaaattacaaattgcgcaatcataagcaaatggaaaaaaaaaactcaaatctagagtttcccgacatgatttcgcagaccatgcatatcgtggtcaagacaagaggatcattgataaattcagtttcttgaagcaagcaggtgcagagaagttgtaccctattttatgaggcatcacacaaatcagcggctggggaagctacgagctctggaactccctgtctgtcatcagtgtctagttcgtctctagctagttctcttgtacttcttgacttgttattgttgttcaggtcatctaactcctggggtttgttcagcgtgcaagtcaataaatttgtattgtgctattttgttaatgaaatgaaacgcgatcgtttggtttttataataattttgtaattgaagtggttcagcttttgacatgagtcagcagggcaggtgggcaaggaggagatcgaaggatgcggaggacgaacgaggtggtgcagcgcggcggagctccggcgatcggccgccgcgcgatcgaggccgatgcgcacttgtgacggaggccactgcaggtgggtcctactcttgtgtgagcccacatggcagtgggttcgtctttttacccaaacgggccgcacctacgcctcgttcccgttccggcccaacaacgcgataccgttctggcccaacaagaactggccggaggtgatctccgtccggacgcgcaagaagtcggtttcttttttctgcttatcccatttctagtttttttttcctttcaaaaattatattaccatgtgaaaaataaactagcaagcaggtagatgtctggcctagcctacttctgccactctggctactgatcgatctaaaaaatgtgcctcgacacagttcatacgaagaccaaaatttgtgtagcatcaccctattgttcactgatagtagtacacaattctgtaaattgctataacgcgctctgtccacaagcaaaatcatgtccaccaaatatataatatcccagtacacaattaggaaatagaatgaaaggaaaataacttattggttgttattacccaaggggacaaacctacactacacctgaaattgaacaagaaaaaacagccgttgtacagtagtacaagacgccaatggctctgagcatccaactccttttgtgttttaactgtttacatcaggaagtccctggggtcagtgacgtatccggtgagggctgaagccgccgcggtgaacggcgaagccaggtagatctgcccttccttgtgccccatcctgccggggaaattcctgttcgtcgtcgacacacacacctgcacccaaatacgtttttgaaatcagttaatcaacaaaaccactcgcatcaacaggatataatttggagaacacttgcaattccctttgcattaaggacttcttttcatcacaaaatggtctactaagggagcattttactttactgattataggtctaccatagttattcccaaaaacaacggctttaatttggactagcacctatgattacccaagtagtaattaatatcgtagccagccaccaataatgtgaaagtaattcagatttttgttgtccctttaaatagagaacaaaattcgtccagggtgacagggttcatgataccttatctttcaaggaagacatctataaattctactatgttgataaagttcatacgaaacaacatttcctgttttactgaaatatttggaggcacttaccataggttcattcatgcgagcatatgtatcacgaggaccacccaaacaagcaccacaactagggctagctggtgtatcacaaccagcctcctcaaatatctgtgagcaagttttgccaccggctcctggtacagggatgctataaatgtccatccacacctacatagatttaacattcttattattaaatcgaaaccacaggatgatcatttcagtatgtgtttgctgtttgctgcatttatcaccttttgtgtcgccggaacgagaaaagtgggaactttaaccttcttcccctgcattaatgaaagcaattttagtaagtcaagcagccatggagtagtatgacttgagaattactgtaacatgagatttaagtttgtatatagagaaattgatttaaataaacaggatggatcaatatgcttcaacaaatagtgctggctataatttgcagttactgagtcaatcaagctggatgtctatcacagtaaggcggatgctagatcattataatcataactgattagcagaaattaacctaaccatctcctataaacacacaaacttcctcagaacaactcaacatattgaattccaatcaaaacccaacccgatttgatcatataataccgtagcacattaaccctttcagcattcaatgtttaaaatattctagatgtgcctatttaaaccaatattccctttctgcattgatttcagctgctcatgtacaagggaccaatgaggtcaactgaagcctggtccatatcaacactctttgagtcagaacctaacaaccctagatagtaacaaatggatacgagcacaaaccattggcattatcctcctcttaagttctaaaacataatgagtatctcatagtactaaataaacaaaatgacttgggtcatatgtcaccaagccacaagattcaagcctcttaccgaagctaagaacaccttcgcagcagcaaagaagtcctcagttttacctccagtacaagaaccgatatagacccggtcaatcttgacatctttgcactctcttgctagagcacggttgtcaggtgaatgtggctgcaggtccaccaaaataacagctttgactcttttgtataatgaaattgatgagattgcaaaagataacagtaactatatgaacaaaccttggcaataactggctccaatttggatacatcaaaccggtagtcactaacaaatctgaaaaaaatgtagtgaaatcaagtataagagagagagagagagagagagagagagagacatcaacagcttatgcttatgcggtttcaatttaactattcaaaacatgacacaaacggaccacagtttatctacataagcttatagatcaactaacaatacaggaaaaaatagagtataattcatctaaaaaaagtgtataattgcacaaggacaacctagtgtcacaagttatcacctagtaggctctacatcattgtgataagctaaagacgacaaagaaaacaaagaaccagttaccttcaaaattatttctctccctacatatagcaatatgacattcttcttttcagttcaagtactcaatatccaaatttagctataatatttctacatgattgaagcaacacgatctgatacttgagagccttgctaatctccagtgcaatcagttagatttcattaccatgatatgccttcagtgcaaaaccagcaaatagcagtattgataaataatatcatgaagatgtgtacggtaggaataggctagctgaatgatcggcatgcagcattttatttatgaagtttgaaagtgattaatatacagcaaaaaggtgctctgtattacaaaaaactctagaaaatgcgcatatcgaagtattgaatagtcaaaaggaaaagagaaggtataggcaataatcacctggcctgagcatcactatagacaggctcgtattcaactgatgtcttgccctgcagttaccaggatgaccgatatggagtcataattatcattatgtaaaagttagaaatttgttcttgtaaatatttcttcttattcgaagcttaaggatgttgggttgttttatttgcataaaaatatcgctcattttattaccaagcattttaaaggccattaaagtacctcaagatagttaaatgtagtttgatcggcaggcacaacaccattcttgccaccagcttcaataaccatgttgcacagtgtcattcgctcttccatctaccaagtttgcggaaatattaggttaaaagccatgaaagatgaaaataattgatcaatctagttatgagcacggagcatacatttagactttccacagttgatccaacaaactccatggatttgtatgttgcgccagatacagaaatctcaccaataatctgcaattagcaattattgaggatgagctattagaaaatgctggtagaaagataagtacagaaaaatatacaagtattttgtagtcttacttgtaaaatcagatcctttgcaagtaaataaggtggcatttctccatctaatacaaacctgatagttggaggcacctgaaaataattttgatagatcacattaagaatatttaaataaaatataaggaacaaaaagaatcctagaattcctattataaatgtaactatcctatggatagtgctattgacatgatacatcccatatgtctaccatgctacgtttggatgaaataatattcagatggcgcagtatgtgcaccagaataaaaaaaattctactgtcagcacccagaaatctatcttgagttctgatttatagtggtcaaaagcatgcagcttgctacaatgccattattacattaacatacatagaactgacacatcattcagatgaactcactaaccaatatctgaaccactttttactatcaaggctgatatttgaattcgatacggagtaatcagaactttctacataccttaagaagagccttcccagtgcccatcacaaaaccagcatcagtgtttccaattccagttgcaaattggccaaaggctccagcattgcatgtatgagaatcagtaccaaggagaacctagacaacaattggagcaggttaatcctgtcctatgaaaccaccagattcctgcattagcacattcactggaagtacctcgcctggtctgcaatgaccctcttgagcaagagcaacgtggcaaacacccttgtagtctggatttgcctgcaaacaacacaaattgcagtttatttaaaaaatttcttcaaaatgaacatgaaaacaggtttgatacaaaacaaacaagctatcaattggagaaaagataatgaaaatggatcggcatactttgaaattgctcaggtccttgatgtcatagaagtacttgatgttctgctccatacagaaatccctgaggatatcaacatttcggtttgctcgctcatcgctggtgaagatgtagtggtccgggatgatgaccaccttctctcggtcccaaaccttggcgtcctccccgaactcccgcttgaagatcccgatggtgccagggccgcagacgtcgtgcgtcatcagcacgtcgacgtccacccacacgttctccccgggctccaagctggcgcgctccgacgccctcgccaggatcttctctgtcatcgtcatggcgctcttcacctgaaaccgcaaagagtcccatcctcatccgcatccgcacgagaatcacatcgagaacagcagcctagcctgggtcgagaagccgtaccgagccagtggaggacggggcgcggggggcgcgggcgggcgtggcgacggcgcggaccctccccgaacgcgccctcctcccactcaccctccgctgcagctgctgctgcgacggcgccacggcggcggcggcgagctcgttctgcgacaaacaccagcaagcaagggcaagggggttagcatcgcgaaccgcttgggtggggaagacggataccagagaggtagaggggagtggggcgaaccttgtgggcgaaggcggcggccttcccagcgacgggggaggcggcggagatggaggccatggcggcggcggcggcgcgcggtggtgggggcggcgaaatggcgaacacctgtggggtgtgaggtcaagggaggcacggggattgtattgtggcgtcgtgtgtgtgtgtcgcgtcgcgcgtgggaaaggcgagccacccggccacagtgccgcgtgtgggaggtgacgtgtgcgatctcaaccgttggattgagatcggacggcggtgagtcggctttttttgtggccaattcgaccttttttttcttgcatcgatccatatgtcggtatgaacagaggaactgggcttcattcaaggccttctttatgggctatcgcgaggcgccaatggaatcttctaagaggccactttgtgtgatcaaatgacaagcccatgtcccctcaaaaaaaagggaatatataatgcaaggtcatcaaattatattaaaaaaaatcctgaattcgtagttttcaatttaaccctatgataattgacatatttttactgaaaagttgtttacaaatacttgacattgcacgaaatactttcggttttacccctatgataaattatattatatccactaaagttcgtttataacatgctcacccacttgctaccaaaactgctactacctccgtttttcactttggtcaaagtcaaactgtttcaaatttaactaagtttgtagaaaaaataataacattttcaactcatgacaaatttattatgaaaatatatttaattattgatttaatgaaactaattttgtattataaatattattatatttgtctataaatttagtcaaactagaagcagtttgactttgaccaaagtcaaaacatcttataacttaaaacggagggagtaaataatatcctagaactaaatagtagtctgtactacttcaaagaaaatagtggtggtggcagtgactctgccacccacctattcttatggtagttttaaaaattactccttgaactttttcatataaatgggtaaccaaatatgaagtaatatcaaggtgaatattccgaatagcaaaacactaagtaccacatttcataaaaaaagtattttagataatagtatactactaatatatgttttatttgtagcaaagtacggacgtttataatttctagtttttgtgtgtatggccaaaagtgtcagtaaaaataagaaggaagtagtacaatgttctcccttcgtacaagcttttaatgtttttcataataaacatctggtgatggaataacttgttacagaagctgacaccaaacaactctacatgtcaaacaggcagaggttggagataaaatggtgtataaaattttcttgttctttatttctaaaaaataccctatagaaatattattgtatttgcacaaatatattagttagattacttcatgcatattcttgagagagactttatgcatatcctacatctccatctctctccttaaagtactagctgttagtagtaggaaaataacaactaaactttaaaggagaggtaatttaaagtgatcaaataaaaaacattagatttagaggccgatttggacggatcacatctctaaacttatcatcatggcaacaataccacgcaatcaatataattaccatcgtaaaatattttaataccgttaatactacatcacaccaactaaagttgtattgtatattgttgcgctagatctcgcacatatccataattcttttaaaaacagcgggctgcactttgtcctatataccatatcatataagtcaaaatgtgccccaaaataaaaaactaattcagtcaaattatgtctccataactacgatatatcttattgtgtgctaaataatataatatagccacaataaaatggccccaaatgcatgtgaacactttggaaatcgtagttatattataagtaagtgcttctacactcttcccagataaattataaattaataaggcatatacgcattggagagtatatttaaatatacataatatggtagactaaattggtcacgtattttgtggttaaaatacaactcaattattacagttttttcatttgatttattccttgaaagagtgtgctgcgaacttaatttgctgaattcctttttatatttttttgtcaagacatcatgcacggcatgtttgtttcaaacctttgatagaaattagtagaaatttaaatgaaatgctatagttcttgcacaaatcctaggattttcctcagtgtacaggactaaaattccacctcaatacaagaataaattctcacggggagtcttgctctgagttgacttggggttgactcattactctccttttccttctgtatgaatgcattggtcagtgttctgcagacaaagcacctgatacaacggcattagtagttttcttcagcttaatccgcctcctttctgagaccactggagttgattagggtagaacagttgaaagttttgtgtgagaattgaatcatggtccctttatcttatatttaaaaagtggttgaaatacggttattcacttgtggtatcatgtaatggcttgccacttgtgctaaagctggtttgtcatgtactgacctttcttgtgcaaagctgaattatatagagtatttattacaaggtgttatcatcgatctaggctaatcaaaataataatatagatcatcatatccaactgccacaatggtatatttaatggtcaaaaccgagtagtacttgactttagccagttgataacatggtcgaaactgaatatgaaaacgaaataatgttaactatgtctgtaatgtttatcatctgagaatattatcgttttgtgagacatatttttttttgttatactatggacgggtaagtgcgtagttacctcataagatcatggttaattttctacagctatataacaaatcgtttcatattttttagttctgacaagaagtagtcaatagtgggcaagaggcccttttccactgattaaatttcaatagaaaatttgtacatttttagtttaaaactttaaagtcatacttttgctttccacgtctttcctttgggctcatttcttaatgcctccatcgtgaaggagattagaaaaattgccttcgaaaaagaaataacaatataaaatactcttttgtaaaaagacacctgaatactctgcaatttcaggaaggcctggcatgacgactgctgagaattaggattcaattttttgttctgatccatattatattgagttaggtttaatatataaaaggaattaaaagaagaaattaactacatgtacgtctgctattacatcagccatgtccaaatatacatttaaacaattttactagtaatgtttttgagaggtaatttagagtacattcctcttaggaaaatgatttacgaatatccttatttactaacatataaacaatttacatttttttctaaagcaagcaatgtgttaattgcttctaaatatggttattattgatgatcaaatatttcatctcaaacagacgcgtacgttatttttctcataccgtcttttccggatgttacaacttttttacgttacaggtttataatttgagtagacacatcccatgtagcattttgaccatgtacaacgaatatatcacaaagtacttatatgccatattgtggattttaattttaattgctttctgaaaatattttgaaatatcgatagccaaatatgcatagtaaaatctttgtaacaaaactatacaaaaaacatgcgtaatattatggggaaaaaaactgtgtttgacagagtctatatataccaacaagccttgcagacataggtacattaattgcaagaagaattcaaacattacaaaattaatttatatacttaatagggacttggccacaaaaccataaaaaaaaccataaacaagttccatgtcacaccgcatatttcgaaattagcaccacctagaataaaaaacctcccctacacaaaacaaaacaagaaaaggattaaacaataagccccaccattatttcgcctcttaaaaaatgccattaatttaaagcaatcaccaaaccaaacaaaccaaaaactcttaaaaattccacccatttgccaatttttccagttgtttaaattaaattaaacccaaatcgatcccttttatttcctatcttgcatttcccatctccatcctccctctcttcttctccttctccctcccctgttcttgaattcctcgccggagaacttctccggtggtctctgagttcgcactccaggttagaattctggtgcggtggctcgagctcgggttcgaattcggatttcctgggttggttgatcttgatcgcactcgcgggaagaagaagaattaggaagcagagtgatctctgatggtcacgggccgagaagggaagagataggagttgttgtcatggagcccgcgacggagaccacggcgacttcgccggctgcggctgccgctgcgcagccggaggcggaggcggaggcggaggcggagtcggcggcgacgccggtggcagtggcggcggcggcggcggcaacctatcagccgccagcgccggtggttccagtcgccgtggcaggtgcggcggcggggagagggaacgggaagaggaagagggggaggccgaggaagtacgggccggacgggagcctgctccggccgctgaaggcgaccccgatctcggcgtcggtgccggacgactccggcggggggcagtacacgccggcggcggcggtgggggccgtcatgaagcgcggcaggggccgccccgtcgggttcgtcagccgcgcgtcgccggtgtccgtggccgtgacggccgccacgtccaccgccgcggtggtcgtctcgtctccggccacccacacccagacgccgctcgggccgctaggtatggaaatttttgagaaattttgccgtaatttcgaaaaattcaggtgaaaggcctgcaacttttttttggttcgtcttaggataaagataataagcctgtttagttggagtttagttggggtggtgacttgtgagagagacaaggcttttagaggagagacagacagggactgtctactgatctagtctaggtaggtgaactgaaaactgaaagaggcctgcagctttcaggttaaggttgtttctgcttggacctgtagtaccaggtgctactagtaccttggttctgcctactgtgtgtcatggtctcatggactcatggttgggtttcagagttatgagtgtcttatctgaggtttcagacttcaggttatgagttatgcaaaacttgatgaattttgtagacaagttaccagtaggtatcactattcagaaagccttagtttgagatttcaggggaaacagtactacagtagttaaaacttcaactcatcatgctgtttactgcttagaacctctgttgggtggtgtggaactgaaaacctgcaacaggcgttttggtgtaaataccttcagttgtgaattgtgatgagatgtagtctgttcctatctatttggttagggtggcaagaataaccatggatgagatgatattagttgctggtgattttgaatctagttttgtctgggtgtattttactgcaaatactattttttatgcattagttgaataaagttgttacttaggtgataaggtgtgcatgtggaaaaatactactactattttgtatgcattagttgcatagagttcttactggtaattgtatgttcatgtgcgcatgacagtatgagcctacaataaattgaaatttgttcaaggatagcatttcgcctccatacttgataaaaacacaaaggctaaaaaatatgagaagtgcatgatgtcctgaaagctttatttctctcaatgctgagaacctgttgatgggcaggtgaattggtagcatgtgcttctggtgcaaacttcacacctcatatcattaacgttgctgctggcgaggtaagatgtcactgattttttctgtttcctcttcttgctctcacaatgttaatagccttgtctactaaatttgcttgaatggtgttaccaacttaattttgttatgccaggatgttaatatgaaggtcatatctttctcccaacaaggtccaagggcaatttgcattctgtctgctaatggggtgatttcaaatgttacattgcgtcagcaagatactttaggtggtacagtgacttatgaggtttgttctttccacctccaaattaatattcatgtttctttttgcaattttcttgctctgcttgtacaatatgcaaaacagatatatcacccgcatttaatttatgaactggaaaggacaatcgattgagtcttgttatactagccatattacactttttactcgattatattggcctctcaagttcattatcattggtcttgcatgttgttaatgaaaccttttacactaaaaccatctttttgataatcttatgatgacttttttttttacttaagtctaatgtaacttttggtcctggcaaatatgaattgcaaacaacatgtaaaactgtggaggaaatattttgaaaaagaaaatgttgattgtatgattgatatggagtcaaagttgagtggcccaaaagttttggtatagtcagtatgcaggttgaggattttatgtgtttcaataagctaagcagaagctgtaggcatgtggttttcagcatgctgtccctgttctagcgtgtgaaaactgatttttctttaatcctagttctccagttaatctgggcaagaactgtagctttaaaccagatcagttcacaaaaaggaaccaaaacaaccaaagagattcctatagagacattataactttctaaagggtgaattaataagtaaagacacagtttcctttttgcagtattgatattttttctgcaatttcgattaaaaaacattaatatcaaccttactggtagcaatgatgaatagtttaaggtataagtgagcgctttgttttagtctaatgagagtgtcgaacagtaaaagcagtaaacagccagggcttcatcagttccacaactagtggaattgcacaatggaaaatatggccactttctaggactttgtcccaggagaatacgatttacaattggaggaaatatccgccaccttgagagcagttgattttcttagagaaaaaaaaaagagtagttgaaattttttttgaacgaatgagtagttgaaaaatcaaatggtgtaaattatatgtcataatacaattcacatgatttgacttgagtatatgggtctagtaatagtcatgatcaggacttctccgtgacccaaaataatctttgtttcttcactttactacatgatgaaagttaaaaaaatgcaaggaaattaggtggaaactaacaggagaccacctgaagaacttgcatggaaattatgtgtgcatttcatagcatgtacatatggatccagtcggacgttgtcagcactcagcacttaacagtggaaaaagtgtgcctaatgtatatattgacaatggaataattccaacacctagcttttccacacaagcacatatgtactattcgaacaaacttttcaagtccagtctgcagtacaattcctctgtttatatactgtacgtgctaatgactgatcaactaatgttcatttcaatcatatatgtgtgcatatccactcttcatcatgcagacttgtttcgatcttctaatcatagatgtgcatatagccatgtctatttttgtatcaaagaacttgattaaaacttttctctctaaattcctaactgatcaatgtgctgttaatttaatcagggccggtttgagctgctctccttatccggatcattcacgccaactgatagcggtggaacgagaagccgctccggtggaatgagcgtctcgttggcggccacggatggccgtgtcatcggaggcggagttgccggcctccttgtggctgcaagccctgttcaggtgaacccttttttcagcttgtccagaattattatcatggactattgctcaatgtttctaaaaatacaatttttcaaaaaaaaaccttctattctattttgaagctatttgtaaggtttataaatatataatatttaatttattcctataatcaatcggcttgaatttgtggataatctatttagaatgctaccttaagctccatggattgtgtgttccaaagtgttgatgaatgatagacgaaactgagtttataacaattattcgagggcacaaacaaatggattaagtaatagaaaagttataagtttgatttatcaaagttatctaaaaactattgatattataacttataagaaaaccaagtgtaccgtctagaagcttgagaagagtgtccgcgataatccgtcatccattatatataaaaaaaagaacgtgctgtacttgatattcagattactcaacaatgacatatactcatccatctgctttgcttgctgttggcaacaacctgattgagtcgattgattgctgttctctatcaggttgtggtaggaagcttcctgccgagctaccagctggaccagaacgccaccaagaagcccgtcatcgagatcacgacggtgccgccgccgccgccggccatcggcttcaccatctccagcggcgaccctatggaggactcctacagcggcagccatggccagcaccgctccggcgccgccgcggcgacgacgacgacggcgaaggccaactcgacgtcggcgttcagggtggagaactggacgccaccggcgccgccggcggcggaggcggcgaggacgaagacgccgtcgtcggaggccaaagtcccagtccccggagcctgacgaagcttgcattgcatatagttgcattgtgttgccgtttgttaattaggccctgaaatggatgtgcagagatgaaaattttcgtactaccatcgatcgatcagtcgtcgtcagatcatcagcaacctccgtatgattaaatcagtgatgcagttaaatgttagtggaagaaattatcacaccatccctcgtggactggtttatccgattaatctgtacttaattatgataaggcagggacagtggagaaatataattaaattctcttgtggtactatctgttaggctcatgtgagctaatgatgtgcttgtcttgcatgcaggtgctgggcagcggctctactcctacctgtgatgcttaattgtttatttatgataagtgcaataattaggctccattcatttttgttaagatgcaaattttacttcagttttcgttagcgtgtttcaaaaactgctagacaataaaaatatacgaaaactttctgattaagtgcagttagatccataattgtgttgctactatctatcgattttgctatatatttgtcgacaaatttttccgcaaaaatttgacagatgtaattacagtacaatcgtagtgtaattacactgtaactatagtgtaacttgtatgtaactttcaaaaatctctccgtaacataatatttcggtaaaatgaaggtcgtgggaacaaattatttcatatatgtgtgtgctatgatttgttttcttcctcaccaaaacaaatcttgtaatagatctaacgatttaaaattatgtgaaacttacatataagttacactgtagttacatgcaagttacagtgtaattacatataagttacagtgtaattacactacaattgtactataattacatctgtcaaatttttggggaaaaatttgtcgacaaatgtataggtagtccccttcagttcttcttcgccgtggagaaattcttcaaaaaaatccggaaattattccgttccaaagaaaaaacgttagggctttttaaagtacaccaatagggtggtgtcagaaaaaaagtaaagcaatagggaaaagacaggattaaaatgtcatggaatcaggaatatgaaatgccttgttcaaaggaaaactaaataggaatttggtggattctgtagagagagtagaaagacaaagagacatgttgcattggactccttagagcaagtaactataagccagctataaacatatatcaagaagataaaagaagagagaagcagcaggctacagatttgtagccagctgcaacacggaatccaagacacaatgtgtgtatgacatgtaggaccaagtattaatagtgtggtatatgtttatatgtaactattgtatgaattgactattaagttgactatagatgatttagagctagtagttggctatactattaaacttgttcttatttggtgggggtttgagttcattggtcccaaaatcaactccaaagttaaggttgaaaatttaaattttgactgataatcatgagcataagtgaaaagatgaggctgattgtctgttttcctgtggaattggtgtatatgaactcaatacataggaatttggtgagttaaaatactttgttcgaaatggcatgttcagaaaagaatttctagaaattacaatcctccatttgtcctatgaaaattctacatctattaaggttaaggtagatccagagcacagttgttaccagcgctttgccgtttacagtcgatccatggcacttcaattagtcaaagttttgtcaaaagagaatggcatgcatcaccttgaattaatttggtcaatcaccagttgctggcttatagagttggaaaatattccctgctctatgtaaaacagaataatttattagcacatatataattaattaggtactagctatttttttaaaaaataataaatatgaattgtttaaacctcttttctatagattttttaaaaaaaccatttaaccgtttagaaaatgtacgcgtgaaaaacgagaaaaaaaaataggaaacgatgtcaggataacgaacgaaaatgctaagtactactcatcattcggtcaagtttttttctagcgtacgttgttgttcatagtgccatatatgcctctttctttcttccttgagcatatgcatctttctttcttcctacttatacatatatatttcgaaaacaactgcacaagttacttttgtcctgaatggacgatatgttatctgattttgatcttgtgataatatcatacatagggtataaacagatgaattaactgttaaaaagttgaaaaaagaacctagaaacctatacttagaaaattcttataattaaatcgcatcgtttagaagcttataaagcgtgtccgtgataatctataacctataataagatgaaaataactggacctatatatcatcggataaattaagatcgatccatcgaccatgggttgatagatgcatgttcggagaagttcctagctatctcagctggggcatgaataaattgatgacctagctagcatacaggaaatttttgattggtcagattgctaagatgcaacgatcgatcgattactgtctcgctcgatagatctagctagctatcgctaggactttctgcatccaagtgcatagttttttttttctttttttgaaagagtaataagcgcctaactttttctttctaggtgctggaataattagtaaccgagcaagcactcaatcttaattctgcaggtacgtagcagctcgatctcagctagctagacagctagtagaaaaagagaagaaagtccacaagaaagaagagatctacagctagcatctgtggactggacgactagcaatctagcatatatatgcagctgcccaaagttctttttttttattatttcttcaattcgttttgggcgaaattccgaactaacaacgaaaaatacgatggcttccttctcctagattaccaaggaatagtaatatttattttataggtgaaagtaggttgcatttaaatatatatatattatatgttgtgaagaaaggaagaaatgacacgaagagtctctatatatggatagtagaaaaagatcagaaattaagctaaagaggccaggcaggcaggcagcatcatggcaacagcctggatcgagttgaactcgattgctagccaattaaatataatcttgccacttaattagttaactaagctgtgaaaattagaatgcaagtctggcgaagttacatgatagctgctggctgctgcatggatcatccgttgagcaattcagtaggaaatttggaataatccttctagtcctgtgtgcgtggatgcaagctagtcatcgaaagctaatatgaagctactgccggcctgcggctgggtgtctgcgtctcagctgcaaaacaaaatgagactgatacttttcttgttacctagctagggatcaagtcaattttcacccctcatcgattggatcagcatccattacttcagtgttagctagagaaattaataagagcaagttttagaaagctccacatatattttattgttgaaattgaacaaaaaccctcaggtatatatatacttgtgacacatgtataaccccagctgatatcacaggactctctttgtttgatattataggtcattttaacttgttttaagtcaaatttcttcaagtttgatcatttttttaaaaaaatatagctacattaccaaaataaatatactataaaaatatattcatgaaactaatttgatgttttagttagataaaattggttaattttaaagtggtttaacttaagataaatctaaattgacttataatataaaacgtagagagtgctaattaatgttttacatatataaccccacccatcgagcatgcaatttaatttaaaatgttatttttataaatgcatgcatgaaattaatgatttagtttaccgtaataaaatatatggtgtcctataaaatatttaagagaaaatcccttatatacccctgaaatttttcctaatcccttctatacccctgaattttgcttacttccttatatacccccaaaatttgattttgatcccttgcatacccctcccgtcagttgaccgttagttgaccgtgtattttctataaaaatgaccattttacccttggatgaacaaagaaattcatgaattacattattaaaaatataaaagcttctcgcatgagactattatagttatgagtttgttgtgcgatgcattatttatcccaaaaaaatatttttagataatgaaataaaaaaaatacgtatttattttttaaaaaaaaggtcataaaaatgaggagcattcatataaagataggtataccaatgttcacaacatttttttttatgaatgctcctgataaaaaaatccattgtcctgataggtataccaatgttcacaacatttattttattttcaaaatttatgtcaaaattttctgcactaattatttagtctcattagttttataaaatgcacacgatgtgcactcaaacaaaattttcaattatttttgaagcttatatttaaacctaaagcatcaagggcaaaaaagacatttgcaaccaaacgtaacagtaaaatgatggaaaatgtaacggtaggggcatggaagggatcaaattgaaatttcaggggtacagaagggatcaggtaaattttaggggtatgaaagagattgagtgagttttcaggggtacacagggaatttactcaatatttaactaactatactgttgtttaatgaatgaataacgatatatatgtatgagaggaatatccacgaaagcatatgcatgtagtatatatattttctactaggaacacatttgatgtctatttatataaaattaaatcaagtgaataatgtagtactatatagcaatatcactatgctagtatatatataccgtattaaagtagtgcaggtccatttatatcacagtaggttatatacatgtagccattaaaagtaacatattatttaatttgaagatctatatctatccttatagcagacggctgctaaagctagaatgccggcagaagcaaagagatgcgattgcttagaaactctacatcgttcgtgctagttgtgcacacgaaatttcctgcatgcattccaagtacatcatgcgtacaatgatcaacatatttgcattattctttttgaacagaatagggtcagttcctccgtttccaaaagacagctagctcctttcattcttacatattgaagacacttctgttataaaatgctaatcactatgcttatacagggagacgcatatgcatattagcatatacaatacacactatgctcaaagaggcagactagtaacatatagtcaaatactctctagtctcactaagattaaggtggtgtttggattccctaactaaactttagtccatatcgtattagatgtttggaactaatttagagtatcaaacacaaactaattatacagatggaggataatttacgagacgaatctattaagcctagttagttcatgatttaacaatgtagtgctaaagtaaatatatgctaatcattaggcttaataaattcgtctcgtgaattagcctctatctgtgtaattagttttataagtagtatatgtttaatattcaaattagtattcaaatatccgatgtgacaagtactaaagtttagtcagggtatcccaaacactacctaaattatgttaaaagttcaccggggagtgtataatatttatggtactaaaatttaaatcctattggaggtggaaatctaccagatgcaccgattctctcatcacatttgaatttacatggcctatttttcttgcattttctttgaagaatggtagtgctcttttcttgaaagaatggtaacgctcgatcgcaaggaaaaagaacaactacaccatcggtgcttctctcatcccttttaaatttacttggcccattttccatgtattttctacggagaatggtagtgctcccaagaaaaaaaaaagatggtatagtcatcttgggaaaaaaaaatcagctacagtacacatatatatatagtactgactaaacacagaaaaatcaaaccaggccgtgtttatttcgtgtgccaaattttttttaaagtatacagacacacatttgaagtattaaacgtagactaataacaaaataaattacagattccatctgtaaatcgcgagacgaatttattaagctaaattaatccattattagtaaatgtttactgtaacaccacattgtcaaatcatgccgtaattagccttaaaaaattcatctcataatttacatgcaaactgtgaaatttatttttttatccacatttagtgcttcatatatatatatatatatatatatatatatatgtttaacatttaatgtgatggatttttttggaagtttcaagcgactcagttgaaaaattaacagcaaagccaagagagagaagataaactcatggactggttggctcactggaaggtggggccagatcttaaaacggtagcaaaagcgcgcgaggcactcggctagtctagtacggagtataccacgaacacgaagcttcctgtggagtctggacctctgctacgtggggagcactgccacgtggcacgactccactggctgcgttgagccggtctgcgtcatcgctgatcgcccgcggaccacggtccaaggccggcggaagcggaatagagatgcgcgttttgcgttgcgcgtgcgtgcggcatgcattttggaaagtgatgtctgaaaatatcctgaatgtacgtaattttgatacaaagatttaagagctagtttggtttgaggtctaaattaggcttaccaatatttgataatttcaatagtgtttagtagtgttcatttggtttgaagtcaaattttggcatgcctaaaaaaataggtcatttcaatagtaaacttaagctattttggcttaaattcaaacacaactttaccttataaaaattagtcatgccaaaacttaccaaaatttgacactaataaaatttggtaaggactatttaggccataaaccaaaccaactctaaattcacgacagagtccacaactgcacaaaaataattccaaacgtatataatacgtcccaatgtatatatatatatatatatatatatatatatatatatatatatatatatatatatattttaaactatgtaaattcatcacagcatttgcttaaaaaactacaactaattaatacaccatcggtccttaaaaaggaataacttgaacatacatttatccagtttccttaatagaagtagcgttttatggaacgagtacaatttttttttcggggaaagggaagaaacgagtacaagattatagttggaaaactacaaagaacaaaatcgtggattaattagaaacaagagctttttatgaaataatagcataaaggcaaagatagcataaatatattttttattcacattctaacaaaatcacaggtgctagcaaacacatgcaggaatagtggccgtacatgtttaccatgaaaaagagaaagaatgtaacagatcacatggcacagcgaaaatgccacgtgtactcgtactccagtctcgtgctacatgtttgtactttgtccctatttaaatccctgttaaaattttacacaatgtcacatcgaatgtatagatacatagagtattaactatagacgaaaaaacaattaattacacagattacgtgtaaaattacgagatgaatcttttaagcctaattgcaccatcatttaataatatagtgctataataaatatttaatatgacatatttaattagtcttaataaattcgtctcgcggtttatatgcggattctataatttattttattattagactatatttaatactttaaatatatatccgtatattcgatgttactaaaactttacaccctaaactaaacacaaaacacagcttttgtaccatcggggcaaagcagtggtctcatacaactacaagtacgagccatatctctcgcgtcaatgcttgcgaaactgtagaagcttccggaccggtcgcgccgcaccgcaccgcacccgcgttaaaacgcaccgagccttcgcgagaactacccgaacaatacccgcccgtttccttgctcgcgaatccactcgcgcgtgcgtgggccccaccagcccccacgcgcgggtatataaacccccccccccgcctcccctctcattcctttttatccgacgattcaaaaaattcgaagccatccaccaacgaagaaaaaaaaaagggagaaaaaaaaatccacgcacactttgcgtgcgaggcgaggcggttcgattcgagaggagagagagagagagagagagagagagagatggacgccttctactcgacctcgtcggcgtacggagcggcggcgagcggctggggctacgactcgctgaagaacttccgccagatctcccccgccgtccagtcccacctcaagctcgtacgtttcgtgcccccttctccctcctcccgcgagtgttttttttttgggattttttttgttggggtggatttggttcgcggcgtggcgggtgttgctactggtctaggttttgcgtggtgtgggatgcgacaatggatttaggtttcgcgtggtgtgggatgcgacaatggatttaggtttcgcgtggtgtgggatgcgagaatggatttaggttttgcgtggtgcgggatgcgataatggatttgggcgtcaagttctcgaatccatggttcgtgttttattttggggaaaaattggggtaatgcggtttttattggattgttgatactctcttccatgctggtttgggctacctgcgcctggttagagtttctgtgcctaatttgtgaatcgcaaatcgtgccgagggaatttctgcgcttgtgcatgaaatgtggcgtatgtgattagattttgaagactagtcgcgttgatttggggaaatagccatggagattagtcttcgttagtttcgaggattagatttagagactgaattggttggtttggtaattcctgacgtgacacgtaccaatccacgctatctgtttataaaacgccacacgcgctactcgattgggcataatttttgttcacagattttgtttgattcgtagctgtctatgaatgggttgtattactgttgattccacgcagcaggtagcactgcaagtctgaatgttatgccccatagcctggatgcttttcatgccttcttaggttgtaaatacaactagattttgtattttttgcttcttgatattcatgcgtccttatcagattgggtttaatggttgcaataatgacttgaatcctgacggtgcctgcaggtttacctgacactatgcgtcgccctggctgcgtcggcggtgggcgcatacctgcacgtcgccttgaacatcggcgggatgttgactatgctcgggtgcgtggggagcatcgcctggttgttctcggtgcctgtctttgaggaggttcgtctcggcttcttctgctgatcctgataactcgattgcttcctccctagaaattcgatggaagttttggtttactgacaatgtcaaatacatggtgtgctgactttttttttatgtcttaccctgtgagcagaggaagaggtttgggattctcttggccgctgccctgctggaaggggcttcagttgggcctctgatcaagcttgctgtagactttgactcaaggtaaatgagcttatcctagttgttttaaacaatggtctattgctatacagcgacgcaatgattcattgatcatgattggtcgatttagaagtaacttggaaaagtaaatgacatgttggacagacaagttggtgataatggttgataatatgtcaaggattgagtgtgacatgatgctcgtgggatttactgtggctcggttgcctttgaattaagtgtcgttgtctactagtgtctggttattcttggaaacattaaatgggttcagatgtgttatagtggtcaaattatgcttgtgaaattggacttttatatcatgctttatctttttctttaaatagattctacaagaacagaagtttgccaaccatgatagtagtggtattatagtctgggtaaatatatcctgcatagtggtattatggtttggtaaatgcatcatgcatagtggtgttgtcatgaagctgatgttcatgatgctctcatgatatgagaggttttagcgttcggtggtacgatattcattcagaattccagggtgtgctgtcgattctggttagtactagtattcagatatgccctttcacattttttcttctgtcacatgcctgcctaatactgttagctagtcttgtagatactttcctctggagttactaggaacgcacaacctactttccccctagaaatcagtagtgctagccttgtgggatattgtcttatggtttgggtatggactttgtttcatggttatcatgggcttcttttattttcgaatgatggccaagttgagtaccaccttaacagataaagtattccgttgtttctgtttgtcttgtggctgcaaaatttgtaatgtaactaactgtcctaggagcttttctcttgttgatctccttaactggcatgattttttttacctgttgactgatgttatatgtctattgttgtgtgttaccagcattctcgtaacagcatttgttggaactgccattgcatttgggtgcttcacttgcgctgccatcgttgccaagcgtagggagtacctctaccttggtggtttgctctcttctggcctctccatcctgctctggctgcagtttgccgcatccatctttggccactccaccggcagcttcatgtttgaggtgagatactggggctatattcttgtccaatcctaacatacaacatactacgcatcctttgcctgaacactgatacatgtgtggtttctcctgcaggtttactttggcctgttgatcttcctggggtacatggtgtatgacacgcaggagatcatcgagagggctcaccacggtgacatggactacatcaagcacgcactcaccctcttcactgacttcgtggccgtccttgtccggatcctcgtcatcatggtgagtacatgactcagcttactgctcaatttgctcatcatcctccgtatgcattgccgcgattcggtttgattcggcttttgaaatgctgacctgacgatgaacacccacaatgtctccgttgcagctcaagaacgcgtctgacaagtcggaggagaagaagaggaagaagaggtcttgagagcttctcttcccgctttgcacataagaaaaaaccaccgcggctattgcctctacgtattatgacagagccgcacttcaactgggttttatggtgaatacaagttcttttgcattttgttgatacggtgtgaatcttctcaggtttgtcgtcgtagtagctttgcaaatactagcatgctacatgacacggatctttctgtaatggtggtcgcgttgatcgaaacgtgaaaacacatcttcatttgcgactaatttgtttgccttttggtgattgatgatgatcctttccccaacttgtgtcattgttcccttttgatgggcgtttttgagcaaaccccggcgaattgtgtggccacgggtggttcgtgttacatttatgcgaacagcaagtttgcccgcgggcttgaatgctacgaatgacgctgcacggcgcgtgttctcatttaccccatctcgacgcagaattcacgccggtaacgtgcggcaagtttcgttaaaaaaaatatgctaactaaaactagcacgcttcgttttagcatcttattttaactggagtcggtcaaattgatccatcctttgaacttttgtatttcggggaatcacgataacaacatatcaaaaccttggagtagaatcttaagagatgaacctctcattctctaacaagaggtatgaagattaagggtctgttcggctgcccgcgctgccagcacgaacagtgctgcgcacactatgcgcagccgcagcagttggtatgctgaacaggccttaagattttcgtggcacgctttttaaactgataaacagtgtgtttatacgaaaactttatatatgaaagttgctctaaaatatcatattaaactattttttaagtttgtaataattaaaactcaattaatcatacgttaataccaatctttttgggtaaaaaacttaatcttcatcttcagaagaaaagaataccaccaaccttatactggattggatattttctattcatattcatagatttagaaaatgttcaatctgaatcaaaagagtattattttcttgacgcttttaaaaatatgttttctcaataaacattcttatattatatttacaacagttgctttaagatattcatcaattttacatatcaaattatttaattatttatatacttaattagataatctataataatttaattcaatcttggctctattattcacattgaacttgctagtactaaaattttcaattccaccaatccgaaggccaaagttttactaccactacacgaccagaggtacatagatataagagcaagcgggaagagcacacacactcgccgctcgcgccaccaaccttaacaccttccctccaccatacgcaacgccatggagaggacgacgacgaggcgcaccagcagcaagggcgccgccgccgcgcccgcgcccaaggtggtggccgtcctcgccggcctgctcgagcgcgccgcggcgcggggcgacgccgacgccgacgcccggggcggcagcgcggccgccgcggcggcgacagcgttccgcgggcggacgaggccggagatcagcgtgcggcggtacgcggagcggatataccggtacgccgggtgcagcccggcgtgcttcgtcgtcgcccgcgtctacctcgaccgcctcgccgggcggtcgccggaggaggagtcatcgccatcgccatcgccgccggcgacggcagcggcggcggtgtgcgtggactcgtacagcgtgcaccgtctgctcatcaccagcgtcatggtcgccgccaagttcatggacgacatgtgagcatccaacattccattctcctctcccactccatttttttcttgtcaactcagctcgcatctacctcaactcgtgccatttttactgccactttttgcgagcaataccaaattaaactagagcatagcttgcatcccactcttaaagaaaaccgagagcacggaaggattttaacaccaggcacatgccaaagttgaccggccggcatcaagaatcaataaaatcccagtcctagcaagaacacaccaatgcagctaacatttttgcagtacacaaaccatgtgccatgcgtgccatcaggcgtgaaatgggcgatcgattgaacaagatatcgatctatctgtgacctgtcggtgcagtgcagaatgcagagtagtagagcagatcaaaggagaggataaaaaaagaaccaacaataacaacgacaactgccttgtgtgtcggcgaaggcaagtcaagccggtgctagaatggattagcagctgttattatgccgcatttagtccattattagcttaattactcatgtggctattttatccagtgctcactgctcattatccagtactactacattgcagtagttggttgctgatcgagctggatattgcagccaagaaacgcatgttctaactaaatgcatcttccattctctgaagacgcttaatctgttcagtattgtagtaattttttgggtgctcgagattgattagctaagcacgagacgacatggccggcaggtaggtgcggttgggatgtccagctcatcgctaggttgttcctctcatagacagcacgacagctgatcagtgctgaacccgattgctcaccaacctacctcacacctgctaactacttaaccaaataatcttttcttttgcgcacttcttaatcaatttaaactactaatcttagctgcattatgtatcaattagtggctaaccagtttagtttataattaattggttggtaaatccgttgctaatactagtagcatttttttttctttttgttgatgtgatcatgtgcagacactacaacaacgcatacttcgcgcgcgtgggaggcgtggaggtggcggagatgaacggcctggagctggagctcctcttcgcgctgcgcttccgcctcaacgtcacgccggcgaccttcgccacctactgcgccgcgctcgagggcgagatggcggcggatgatggccccctgccgtcgccgtcgccgtcgccggaggaggaggggaatgaccgtcgtcagccgccgccgcgacgaaaggacggcatcaccaacaaggtcgccgccgccgtggacagatcggcgctgctcacggctgctcatcacagagttgtagtagtagagatcacccaatgacggcatacacggcagaagaagcgccataataatcaatggccattgattgccttgcccgtgattaattctttcatctctttcttcgttttcttctctcccaaatctgtttcgtggtgatcagtgatcacgattcacgactcacgagctgttgttggttgttgcctgccattttcgttgatcattttgtgtataatcgcaagatgttgcatgcgcaccgcctaacccgtagatgatcatcttgaattcttaattgacacaataaaaaagaaagaaaagttttttttttttaaaaagaaaccgagccagacttagctagtgctatattaagcagggtgaaagaaaaaaacagataaacaatgaaaaaggttataagccgtaagtgataagaaatactttatgggtaaaacttttatatatgtgttcttgaaatcttaaaagtcaatagtaaaaaaataaactatgatgaaaaacattaaaaaaaactactttaaattaagttttaaatttaaattttggtccgtgattttttttatgagaaacacattacaaacaaaagcactcacaacacacgtacacccatccttataaaagcacacacgcacattactgtgaacaccttcggtagacttaagctgtgttcggaggaggggttgctcccggcaagcaaaacgaaaattgtttgattgtatgattaattaagtattaactaattcttttttgaaaagtggattaatatgattttttttaaataacttttataaaaaaagtttttgcataaattacaccgtttagcagtttaaaaagcgtgcgcacgaaaaacgagagacgtgggttaggaaaatggaggaaagaacacagatggtgtggtcattaatgggggttgggaacacatatcctccgcccggaaagcggagcaatccattagcgcataattaattaagtattagctatttttttaaaaaaaatggattaatttgattttttaaataattttcgtatagaaactttttttaaaaaatacacagtttagcagtttaaaaagcgtacgcgcggaaaacgagagagagggtttgggaacccagggcaacaagccagtcacttgactccaattgagtcctggtatccaatctatttgatattttgaagcccaaaccccagcccatttatcctggcctgttccataaatgggccggaaattaaaaatccagcccatcttgtgactgactcattcgaatatccgactctagtactaccgactagtcagaaacccacgcgaccagtgccagtggcgtcgtcagttcactcgcttcgcttggaaatcgcttcggcttcgcttctccgcctcgaaagcgacaaaaccccaacagcgatggctgtgcccgacgaggtcgccgccgacgccgacgccgaggttgaggaggaggagccggaggaggtggagtggttgtcgtcgtcgtcggactcggagccggagcacccggcgctcaaacagtggaccccttcatcacccgactcggaggaggcggaggcggagcagcagccgtcggcgccacagccggcgagctcggtgtcggcggggaaggaagatgagggggaggtggggttggaggaaggtgaggtggggaagccgttcagatggcccgggtggcccggcgcgagcgtgttccggctggtggtggcgacggacaaggtgggtggcctcatcgggcggcggggcgacaccatcaagcgcctctgcgaggacacccgcgcacgcgtccgcgtcctcgaagccgccgccgccgccgccgccaaccggatcgtaagacgactcctccctcgcacatttttgggtgattcgagttagggctttcgtcgtacggtggttagaacttggaaatagcatgttgatgattactccgttcttcgtttgagatcgggggtacttgctacggcctgagctctcaccttgtcggcttgttgctgtaagcaatacatggcaaatgttcgttcagtgtattagccacctgattctccttgttaattctgaattggaccgtgctattgtcatggttccgtgtaagcaatgtcctgcagcttcagcatcgacctagtttcacggtgacatgcataactgatttcatcactgttctctatgaacttgggcgttttgacatttgccatgttgattacactatgcaatgttctgctaaggacaatataggcttgcgatatttttcccatggtcaaatgtacttaattactctattagggtgcacccatgctcttgaagttttgacagaggttgcagcatcctgatcactagtgaaaattcctgggaagaagtggaaggcttcagagactaggatgacttatgatattataaagtttgagaacactttcttcattatgaaacagccttattagaagccttctatatgtaacagtttaattaccgcacatgatctaattcctgtgccatgttgggttctatgtagctgtgtcactgttctagaagctgataaacgatatgtggaaccacattgcatggtcttctttcttttagctttctttttgttctaatagttcaatagctaggcgaggcttgcccatcctatatttatttggttcctgcttcgtttctgtcatttattctttgtcaacatcagacacaataacctactagtgtcatgtttcaggtagattctgatagtaatgatttcatagctaaggttacttttgaaatggtagaaaactagtgcaagatgtgcagatggtacttcttatcaaagccataaacttgttcatatcgagtattcataaacttgttgctcctgttccatatttatgtgcagaaaagactagtctctggtattatttttttatcttgcaatatgtttattttcttgccgttgtatttcaggtgttaatatctgcaacagaagaatctcaagcagagttacctccggctatggatgctgcaattaagatcttcatgcatataaatgatatagagaagatcaattgtgatgatacattatctggttctgcaccagaaaaatgttctgctaaattattagtcccttcagcacaagccacacacttaattggcaagcaaggagtcaggatcaagtcaattcaagaaactaccggtgctactgtaaagattatagataaaggtatgtggtccaatgttctatggaatttgctcagttaaaagaaaattggacatgtggtgttactctccgtgtttctaaaatcaacgttcagaggttggatatttccaattcgaatcacttgttatttgttcctcaatttatttagtatcctgtagcttgtaatatcacaaggattcttttaactacaatgtccaaaaactaactggaaagtggcaattatttcaacagcacttcaacagtgagatattttctaaaaagcaaatgatttcaatacattgacagcttctaccaatttatccacttctttttcctggtttcagtccagtttgttgtgcgaacttagtgcagttctttggatgtaacacttgctattgtgtgtagttgagcttctgagttatgatgtagtggatgagagaattgtggacatacatggtgctcccctcaaagttctccatgccctaaaatctgtactcggagttctcaggaagttcctagttgatcacggtgtgcttcacctatttgaaagaaaggtaatgctacctgttcttcagcatgctttcttatgcatgaacatgaattctgctcatgcaattgatatttatgttgttcatctgcagaaccaagcagtaggtgaggcacatgataattctaaagaaaatcaagtaaatcaggttgccagtgattatcgtcttccagtgaacaaggacatattgttacctgaccatcgaactcctcttaacccaaaagtcagcagatatttgttgtatggccgagacccatctgtttgtgatccatatttatctgatcccagtcaccaagccaatgccataatacaacaggtctaaattcagtaacactatatcttataatcctctagttagtagttacaaactatacattttttctcattttgcttgtaacaattacctcgagtttgaactgtttacattctgatttgttttatatgtttattccattaattttttttttaaaaaatatgaactgatgtactcatctttccaattatagtgctgctgcagacttttttcatataaaatggtttttgctttcagataacacaaacaatgcagatcccgttgccatttgctgaagagataattggtgcaaggggacaaaatatttcttatatacgttctgtcagtggggcagttgttgatcttgaggaaagtagagattatccgaatgaggttttagttatgatcaaaggcagttcttcacaggttcaaactgcacatcaacttgtacaggttgataacctatgtcctgatgtacactgctgctcttgtatcctagttactgttaagatgccataaaaattgggcctctagctatgcttatttctaagtagactaagtcttgttggaaccagggccctgaaactcaccctacaaaactagttgccacctgttggttaaattgagttgatttaatagttgtaccagaggtagggcgtagggtgtttgtactgcttctagccaacccatttaaactgcacgtgcattttatttgttgccactatgggttgaccaaacccatataacctgggtttgaacaggcctaaccatagggttgtcttgcagcaggtttagtttagttaagggaatgcagtttcaggtatatgcactagccatagcatatgatggttgccttcatcctgctagtcttgagctggacagacttgagaaagccacttcatcagtttcaagataggacttagatagagccacttgttccctattgtgattttgattggttcctaagccctaactagtttctccctgttccagccaactagagtgtttttcagtggtacccagcacctgctagcttactaatgagaaactgaacagcacgaccctaactagtttctagaattgcaaattgcattcattgtttgtatggagagttagggaccaaccggaaaacggttattacaaacataagatccattatcctgtacaaatgatatttcatccatataatatttttccatattattgaaactgtatgcagttgctgaatgtattcttttcattttcgcaggaggtcttatcaggcaataaagagcgaccttctggaagcagctacatcaatcttgattctggcccaaagtttctgatctctggacatatcaatccagtaaaccgggatcacttggcatcataccgcgtccatcaaccgtacattgttcgatatggatcttcaagcttaccgcggttgagaggatacaggctgtagcaagcaaaactaactgcacctatagcctcattgctgtgtcctgtgtcaaacaatgaccaccaggcgcctgtgggagaggatgaagcggctgtgcttccagtagatgcttagataattaaatatggtaaagtttgtgtattcagttgtcagtcagcagaagcaaatcctaaattgtgttaaattctagtactccgtagtagtaatctagtctagtttttaacttcactgaagctccccatttctgtatggagaagttctaccatgtcggaagaagggctctgtaagttgtatatatacaccattagtagaactgcagttgttaccaggagctacctggcatcttatcgtaaattttctactacttcccaggagtaaaaacctgatgcactaaatgatatttggatgcttcatagcagaagacagtgaaactgacaggatgcaaatcacacagtagttagtatccttaagcttcgtatctattctagtcagagttattttaattattgcaaaagaattaggactcacaactcttgcaaaacattttttgatgggtaatttgactcttgcaaaacatatttttgatgggtaattttattttactcctgaaaagaaaaaaaaagaaggaaaaatcgcaacaggaggtgggtgggcctagcagagtagcagtagcaggtgaacccgcaccagcctcctcctcactatataaacacaccaccgccttagctctctcgagcgcctcccttcctcccccttcccgcaactttctagaagcatctggaagcttcggttgggtgccccaggtgagggatctcgtctccgatctccctcctccctaacctgcaccgccttgatcgaacccaaacctctatccaattcccatagttttgaaagattttttcagtttgctttcaattgtcgtagtcgtcagtttgcccggcgccgccgcctccggcgatccccatccatcccgcgagcgaggagggccacggcgccgtcgttcgttctgctgcttccgctggcatcaatcctggtgtggtgagcacatcctccgccacctccgcctgcgcggctgcgccgatccccatccatcgcgcgagcgagcgagcgagcagggtcgccgtcgttgtcgttcgtcctgctgattccgccgcatccgttacgcgtcgcgcatcctctttcccatctctctctactcgcgcactttttctcgaatttgaatttgcgttaatcctagctgcttctgttctagaaatttgccttaaccttttaatactaataacagtttgtttgttcccgaaaagtttgggggttcaactgaacccccatgttagatccgccgctggttcccgttagcattttccactctagaccttcccgtcatggaatgcgatgaacggtttttggattttggtggaaatggttggcttgataatttagaagaattctgagtgatcattttgggatctatttataattttgatctagaaagttggattgttctgacatctcagttggccatattaaaggtttttgcaaagggttatccggttcaaatgtaccttctgtttcttctctgttctgtagaacaaagtgtagtttgttgtatattttggttcgttatacactgcagatagaacttctgatatgctagttcatctgttcatgtaaaccattgtaacagcttggagtattaatgatattttattttgccactgtgcgatgttcgatcaatcccctgtaatacttttccacttctgatcttctttcaagaataatctgtatttgcactgaaatcaccaattattgtggacaagagtgagcaggtgcaagtagtactggtctgaatgctatacataaggaaaatagttttttacacacaaaagttgtgttacacaagatttacgcataacccatgcttttatgtttttttatggaataacccatgcttttattcatgaatttaagcaatcttaactgtcacacctactcacaagtcggaaagttttccaaaattatcacaccagcaagtaatatgcgaattttcagttcatttcctttttctgagttcactactaactcttgtgatcatcaaccaaacaaaagtcatggggattacacttgtagagtgtagtcattttggagcccgtatctattttaataatagtaatagtaccatgtgatgattttattagagaactagtcaagtaaattgtgctttgtttctattgcattgggccaatgatcctgcaactgaatttttacgctttcagcttcaaacaagctgcatatcattctgcaaatgtttcgacctgtatgttttatggacataattgtgccttcttgtcaagttactttatataggacatactggtagtttacttatgtactggacaaagaaactagcacatgtggattgatcaaatcaactcataaaaaaataatatcactagcacccgttgcatgttagatttatttcgttttggttgcatcataaatgcatgttgtgaacttgtgatgcatcacttttcccatttcaagtagcgagagctagtggcagagtaaagcttgcctattctattagactgtcatgcatttccttttaggtttaggtttatatttgaaatggattagataattaatcctagctttctgttgaattctcttaaactgttggttgcctattctaaccatcagagattttgctatctgagaataggtgagctagaaacatggtactttatgctgatcctcctcccccaataaaaccccctgaaattaaaatcaaagaactagcaaataagtctacatatgagtcctcaatgatggagcaaaagacaagactgcacgccattgagcgccacaggtcgtgtgaagtgagtcaagcaatcttatctgaggtagaaaatcgtcatcaacatcaaacccttgagcccatcaaaagcccaatatctgggtgttctccttcagtagaatcaactacagacaccaacacagtacacaggcatacggttgcagatgctgcttgggaggccctaaagaaatcaatagttcacttcagaggccagccaattggaactgttgctgcaatagacaagtctcagggagcactcaactatgaccaggttagcatttccttcacaattgaaccatggatataaccatttagccataaaggttccttaatattgttactattatctctatataaccttaccaaatacactcagcacatgccactcttagaatattcagataggtaaaataatgatgggtgtgattatttctcttcctgtaaaaaaacctagaaactcataattctccttatacatggacatccaatgcaattgacaatgataaagttcttgtcactctggagcaggttttcatgagggattttgttcctagtgcattggctttcttgatgaaaggagaaccaacaatagtgaagaatttcctgttagaaactgctcgccttcagttaagagagaagatggttgacctctttaagcttggtcagggtgtgatgccagctagtttcaaggtgcaccactgcaactctaagcacaaaactgaaagcctgcttgctgattttggtgaaactgccatcggaagagttgctcctgtggactctggcttatggtggattattcttcttcatgcttataccatatggacaagggacaattctctggctgaaagtcctgaatgccaaagggcaatgcgtcttattctcaaattgtgtctctctgaagggtttgatacatctccagctttgctttgtgctgatggctgttccatgattgaccgaagaatggtaagccacttaaacccaacattgctttgttttgttattgatggtatgtctcttaactgtttgcttactttcctactagagtgttaacagtcctgatgcattgtcagaagtattatcttgatcaaagttgaaattgcattaggtttgttgtagtaacatatactgacgcttttgaatttattcaatctggggtttaaaaggaactgccttctgtcaggtcctgcctattcggtttattattgactgcagaaacattaagaatgggatagggtagagcattacttttagttgccatgagcaatatgtacatgttaaaacagttatttacaattctgggtatgactgttttcttttcagttaatccaggcattgatatcaggattttttaaaaaatatttgggctgttaacggaagagacgtaatgctgaatggttatagtggtaccttctgatacatgtttatgttgttaaagatcggcttgttacatattaatcaattggatgctcttaaatttgggatagcaaattatctacttgtcagcatgaacatatttctgcatggttatctttcccttacttacagattgcaatctgtgcatgtgcagggtatatatggctatccgattgatatccaggctctgtttttcatggctctgagatgtgccgttactttgttgaaagaagatcacaacgacgactttgtgtaccaaatatcaaggagaatcaaagctttgagctaccatctgcacagttactactggcttgacttccagaggctgaatgagatataccgctacaagacagaggagtactcagagacagccttgaacaagttcaacgtgataccagaatcaatccctgactggatattcgacttcatgcccagccgcggcgggtacttcatcggcaacgtcagccctgcgaggatggacttccgctggttctgcctgggcaacttcatcgcgatcctctcctcgctgacaaccggagaacaggctgaagcaatcctggaccttgtggaggagcgctgggaggagctcatcggagagatgcccatgaaggtgtgttaccccgcgatggagaaccaggagtggcagatcgtcaccgggtgcgaccccaagaacaccagatggagctaccacaatggaggatcatggccaggtacgtacgtactatagcagtataatctccaaatgttgtgcatcgatctgcagctgtttcttgtggatgacaatcataattgattggaatgatgatgatggatcagtgttgctgtggctgctggtggcggtgagcgtgaagctggggcggccacacatcgcgaggcgggcggtggaggtgatggagaagcggctggtgaaggacgagttcccggagtactacgacgggaaggccgggaggtacgtggggaagcaagcgcgcaagttccagacgtggtccgtggccggctacctggtcgccaagatgctcctcgacgacccctccaacctccgcgccgtctccctcgccgacgactgccacatccgctccgcccccgtcctcaagcgcagcaactccttcccgtgatgatcaacacaatgctcaaactaagctcacaccgcacttcacatatactcaccaccaccacgtaattaacgctgcctcgctgttaatgttcttatacgtacttagtagtagaagtactggtagtaggaatttgggtgcactcgtttcaccggatgcctcagctggtggagattttggtagcttggaagtgcacgcgcaaaccttggggtggaaatggatttttttgatcaggatgttgggacgctcatgattagacctggatggctttgatgatagtggattgattgtccatccacattgatgtcgaatctcttctgcttatactgagcttgttgttcttgttgtttgtcggtttagaaaccaggtcatttgtatcttgacgatcaactgggtgctgcttgttgaaacgttgagtagttgtcgctgccattcgatactgcacacttgcatttaatagtgagtttctattacactgtgttggtgtacgaaaggaaagcgtggtggtgctaagctagtgttatctcggccacaagccaatcaaaggcacacgtaggacgagaccccatccaaccaccccagccacgtcagcaagagggcccaccctgacctgccacgtgggcaagaaaaaggaagagcgcactcccactcccacccaaagtgaagtcccaagcgctcacgctagcctctcatttccgcctctctctctcccccccatctctacagaggcagcagcagcggcggcggcgacaagggaagccgatggccatggcgacctccaccttctcccccccggcctcgcagctctccctcacccgccgccgcctccacccgggccccgacctcctcaccctctcctccccgcgcctccgcgccggcctccgcctcgcccgcgccgccgccggggaggcccccgtggagactgtcgaggcgccgccgagcaagccggaggccgagccgtcccccgctgcgtccaacggggccgccgtcaaggccgagaagccgccggcggcggcggcggcgcccccgctgcccaagttccgggactcgaggtgggtcaacgggacgtgggacctcaggcagttcgagaagggcggcgccgtcgactgggacgccgtcatagacgccggtgaggctcagttcgtctgcctccctattcctctctatgcttcagtttgctgttgctgccttgctgctgctgctgattaattagctagcactacactaatggcggtggaattcataaaatctactactagagtactagtagctaagcattgcataactgcatagtactacttcagtattaggactcctttatcagccattagttatttggtatttacttgatgaatctcagaatgtttgcatgaattgtcgtggatacgattgatgggagtgccgtctcggcactgcgacttcaattccagtgtggttttttagctgggttgctactgtgctttgatgaacccattgctatgccctctggcccctggatctgtttgtgcttatattggagtttggagcttacttcccattagtctcagtgatagtgacagtgaccttccatctgctgaagcgaggaaccagcttgctgacaacaacacctacagtgctatccattcaggttcctgttctctatggctgtacaacttcaataatcagtgcgccgcaaaattataaaaataaaacttcaataatcggtggagcatgattagatggatagcctcatctagatgaagtttcttaaaaaaaggatgaagtttctagcgtgtcaccattaatttgcttgataacgtatgtagaagatgatgtaaactgctagacacagtacacttgcttttacagttcaagctgctgggagtgcccttgcaaaaaagaaaaaaaaaacgaaagctaggtggacatgggaagcgctggagtgctaggttggatagggaagagagatctgtcgtgtgtgcacaactagagtttgaactgaactgaaatccaattgatttatgttctgaaactgatcttttttttttctcagctgatttgcatttctgtacgtagcttgtgtttttttaatttatgaatcggtacaaacaagatgtctgccaatgatgtgtaaacttatggcacttgtcattgtgctgcagtgaatggaacaaaatgggattccttactatctaatgaggccgactgacataactccttggaaatgttgcaatcatctgatgccatatttgtttgtttgcagaggccaggagaaggaaatggcttgaagattgtccagaggcaactagccctgacgaggccgttgtcttcgatacttcaatcataccgtggtgggcatggatgaagcgtttccatctccctgaagccgagaagctaaatggtcattcttgaatccttctccttttcaaaagctgaattcaaaagtttttacttgcatcaagccacatgtgcaaacaaaccacgtgcatgggaaagaagaattcatcacttctaacatcacactcttatgtctctgcaggccgtgctgccatgattggcttcttcatggcatactttgttgatagcttgaccggcgtggggcttgtcgaccagatgggcaacttcttctgcaaaaccctactgtttgttgctgtggctggtgtgctgctggtcaggaaaaacgaggacatagagacagtgaagaagctcatcgatgagacgacgttctacgacaagcaatggcaggcaacctggcaagatgagtccccttctcagcccaagaaatagctctgaagtggaatctgaatctgaatcctccctatgttgtattgtatcacttctttttgcagcccttttctcaacccatttattagtgaggctcagtacattttgatgatcttaatacctatgacgtcttgtaaaaagtacgaactcgtttctgtgctagaggttaacgttgctgcgggttacttggttgaatgttttctttgtgagaattgcttgtactagttactccctccgcttcatattataaaatgctttgactcttttctaaatcaaaattcttttggtttgactacgtttgaaaaaaaaacgtagcaacatttttaacatcgcatcgcgccagaacaaatctgcacagttccatcggcagtgcacacagccgttataggaaactaaaaatcaaaattgttcttggagctcgaagtaatatatcaagacattagcgcaacctgtgtcaccatgacaagaaaaatgatttgccatctactagcttgacctgttgtcctgttttcggtaagcaaaaaagagcatttgcaaatggtgcatcacaagttcatgtgccaactttacaaattgcaggcaaactaattccaaaagtcgggcgtgagttccctcatcagttgacaaaattgctacgcccagttgcctagtttttgctaaactgacgctgcttcaagtatgcacacaatgcccattctgtatcagttgaacctgtcaaaatcagggacaggctgatccagcatcatgtatcgtatctaagaaataaatgtgcatgtcattgaggctaaaatgctaggatagatgttcctggaaaatgaaccacatttcagaatggaacaaagcacgggcatgaacctacgcacataagaacacaaggtaggtaaaatttgaaactagactagatatggcgtgcactgtatgtgcatgtcatcatcattaacgcataatgcatgtctgggggtcagctaatgcagatgaagtagtctatattttacaaatgagatcttttaactatagaagatagtggcaccgaagtttcttaagagacacatcagacgaacctgtggagaacataaagagaagtctgcagtctgatatttcgccatctgtagtgtagactactgcctttgatcaggtacagaatttaagtcgggcatgacacggttgaattctgacctgtgaacggagcacatcaaattaaacaagcaaacaatctgattcttactgaaacaaattaaagctctcaggaaaaagacaaaagaatagaaacacaaagcaactataacatacccacaggtcgaacacttcttatgatacttgcagaatatcgataaacaaactgaacaaacatatcccatgtcaatagtcttcttatggcagaaacatctgaaaagaaatatagcaaattagatgcagttgaaaggccaccagtatcagacaaactgaatggaaacttaaaaacaaaaataaactgagctgctaatcctgacctaaggcctttggtaagatagaacttcacaaaaaaaattagctgtatgtttctcacatttttctgaaattgtcattggtattatgctatgttttcagatctataacaagcatctcatagctatgtcacaaggcattcaagaagatgaagaaacagagatatgcctaatgcctagagaacttaatagaggaaactgagtgacacatacgaagcacggaaatccactcccagagtcttggggaggcgcagaaaggttcttgagtgtaaatcagttgcaaatacagcctgcatatttgcagaaatgagtcattgagctcaagcaaattaatcaagttatctgaaatagaaatattcctactcagatagaataaagacaaacacaaaacagagcaactttggaactaatatatatattccaaaaacaggtcaacgtaagctgatattgaagcaatagatttgggtcagaagtaaacagcacagtctatcacgccataatctgatgattccattgttgttcattagtgtattgtacatatatatgtgaatctgattctagattaacaggtagatatactaccagtaccaggaagatggagtatctatgtgccccactctagtgacagaaaatattgagttttgacataggagatgaactcatgaacatagacactgagagggcattcaactttgtagtctactagtagcatccaaaatcatttggcactaaagtttagagatgtagttgtgttgatcttcccagattgacagtttgagacatacaggaaatattatgcttgagtgcacactttaaacaagccacactcactagagatgcatgagttcccaaacattactagtacattctacattcaagcaaaggcaggaaaacagaagagcctagacaaccttagatgaaagttgatattattttttttcacaaaatgaaaatgggctgatctggcatttttcttttaaagagttacatcagattcatgtgctggaggttagttgccttcttaatttttcattattacacagaaaagatggccacaggctttatataaatgcatcatgcagttataaagatgtaaccatggttgcatgagaaaatatgtgtgttgctacagaagtgccagaatgacttacagcaaggtattgaaatagaccatttagttcttggggtttcaaataaactccacctgttatatatgaagcctgcaaatgaaaggccagtatatgatcagcattcagcaaggaatagacagctctatgggggcatacatgtaaaagaagttataaatggaaagaaagaccaagaaggcactgaagaacattacctgttgcaagaaagcagagtcttgggttcctactatgcatgaatcgattgggacctaaatttttttgatagaaaaaaaaaataaggaccaaagttgttagtgaatgttttaagcaatgaaactggtgatgtatatagtcatatagacatgtctagaggtagtgctacttgcagttgggactcactaaaaccactacagttgtgaaatggtgaggtgacatcaagagtatcaataaaatgaattgaacaatgaacccaaatgtacggaatagtgacagttcatgcaataccatggaacgttgagcagaaaatattgagttcatgaccgctacatatctgcgcagcatctcattgagttaaaacatgttccagaaaatatatactacacaatcaaatcgatgaatgtgcgtactgttcaggtccatctggagaaccctgcaggcataaaatctgtatttcgtgttagcataatacatgatgccactagaataagttgtgaggatattgagtagaaaaattcaagaaaacaaagaaaattaaataattatatcattagtgatgggtcagatgcctatcaggtttttttagtccatacagcatgcgcattgtaaacatttatgctaactgatatgctcccttctatgttgttctcataggtcaacatatcaacaggaatcagaacaaaaggtaacttagaacacacacagagtgtatactcacccgaggttgtggatgtcgagtaccagaccgaaaaaccctctgtatatctaagcatcctccatgttaagaaatacaagcacaaatggaaaatgcactaacaataagaaatcagtaccagtcataggatacagcacagagcaagggacagtgcgcctgagagaagagaggctgcattgccatcagcaacggaaccattgctgctagtggcacgggcgtcttctgcaatgaactcatccatcttgcggctcgcctttgcgaaggtggccgcgacgtctgcagcaccagaggcactagcatcgctcgagtcgaagatgtaggtgcaagagctaagccccgcggcgatgacgaccacatggttgaggtggttcagaagcaagagcgagttcacgtagtggatcagctacatacaccccggaattgcatcagtattaagtgtaaatcctctcctctctggagaattcagagtcaaaatcaaactaactagatcagcgagcaactagagattgatcctctctggaggagtcagaataaaatcaaactagctagatcagcgtgaatgcaactagatactgatcgtgtttccgtggttaatccccatgatatagatgtgaatcaaaaactagaaatcgagaggggaagcgggggacgagaagggaaatagggtttgggaggtcgcggcgtacatgggcgaagaagtcggcgaaggggagggcggcggtggcccagaacaaggggttggtgtcgacgacgacgacggcgaggctgacgtcatctgcgcaggcgcggtggagacgaggcaagagaaaaggggggaagattagcgagacgcaaagggatcagaaaacggagacggtcgggcgccgcttaccggagtagagcttggaggaggccatggcagtctcaccgccgtcgcggcagggccggacacgcgcgaacggaggcgctggttgggccgaggcggcggcggcgcgagcggttgccttgccgccgtcgggaggcggaggcggaggcggcgaactcggcggagttgcggctgcgcttgggggcggcaagagacgacgaattttttttatttataatttttttattaaaagttttacaaaaataattttccattttgaaaattgacggaagtagtcgcctaccgccctctcagagggcggcgaaaatgacgtggcagacggccgttcgctctcgggcgacggccgtcaacgaaatttgcaggcggcccccttgccgccctccgctagggcgattttatactgtgcggggggccgcctgcaaatgggcggcgagggggggcatggaattttgcaggcggcccccttgccgccctccgctagggcgattttgtactgtggggggggggcgcctgcaaatgggcggcgagggggcatggaattttgcaggcggcccccttgccgccctgggggagggcgatttttgcctccccctataaagcccagtccctcctctgtgaaatttcattatattcactaaaaatccaaaaaaaacgaaagagagagaggggagggcagcagaaggggagcggcgaagccctgctggttcgctcaattcatcacaggtatgctcccatacatcttttgcatttgtactaatatgttatgtttgagtatatatgttgcgttttagttttagttccatatattttagcacatctgtagcacatagcacatatgtgtagatccagagcatagaatataatagtatgaattgagacatagacagtagtgttaattgtaagatgtagtttagtttgatctggagaatgtaacgtaattttagaaatttagagaacaatattgtagagaatgtaacttagggcgtagtacagaaatgcgaggttaacgcagttattgttttcatcaggcacaatgtcaagtaaggtcacatttcagatagttcatggtaaaggaaatattagatttggtccagatggtgttgatctgtcagattttgtaatgacatctaagggcatcgataggcctgcggagagaacatttcagtcaatttatagttggttgttgagaggatttagaatagaccaagaagtctacacaatgtcagtgtcagttgtagtgagtcgtgcaacagaaggttatttttgggaactaatgccgatggacagcactgatgcttggagacggtatgtggaaatggcttttgaacggtcatggcccctcgttatatttgtgtcggtacaagagaaagatataaatgtttcaatgcaaaccgaagatgtagagggtcctatcaatgcaggggatgttgttggaccatcgatgcaaaatgaggaaaatcaaccaagggaggagcaggctatgggcatggcggatgagggggagagagtcggtataattgttgatgaaatggagagggaagattcggataatgaggaagcggacgacgacgcatcatccgatgaggaaggtgatgtaatggccactgattgggcaaatgaggacttctctggacttgttatatcagagggtgatcatgtaccctgggagtataaggagaacgaggtaattgacggtgcaaggtatgctcataaggatgagatgaaggaggcggtgaagcattgggcagtttccttgcagagagagtttagggtggtcaagtcaacaaattatgtgtatgaagtgaggtgcatgaaggaagattgtccgtggcgtgtccatgcatataagggtaaatggaatgattattggaaagttagcattgtgaccgagcacaagtgctacttacaaggggtggagaagtatcaccgaaacatcacttcagcttttgtggcaagtgagatgtacagcagtgttgttggtaacattggctttgaaccaaaatcaattattaggcacatcgagaacaaattcaagtacaccataagctatgcaaaggcctggagagccaaacaaaagatcattgagatgaggtatggcacatttgaagcttcttatgataatttgcctcgtttgttagccaccattgcccagaggaataataatacgtactatgacctacatacatttacatcggttgatgatcgaacaaagagtatgctgcaaagagcctttttctcattgggtgcttgcatcaatgcttttgtgcattgtcgacctgttctatgcatagatggaacttttatgacaggtaaataccgaggtcagatattgacagcaattgggtgtgatgggaacaaccaggttctacctatggcttttgcatttgtagagagtgagaacactgaaagctggtactggttcctagagagagtgcacattgcagtggtgcgtatgaggcccaacgtttgccttatacatgatcgtcatgagggtatgttgcgggctattgactacttgcagaacggttgggatgagaagggacttccagctaagtggcctgatgttcagagtcggtggtgcatgcgtcacatgggtgcaaatttctacaagcaattcaagaacaagcatcttatggagctctttaagaggctctgtgcacagaaccaagagaagaaatttaatgagttgtgggacaagttggatgagttgacaacgaagcaaacagatgagcaatctcgcagaccactagttgaaggtgacgagcctcccatacctcttggtgcattacatgatgacccaccaacaatgagaaggaggtcaaggtcgtccatcagaaatttcactcagtggattgagaatgagcctaaggagaagtggtctctattgttcgacaccgatggatctcggtatggcataatgacaaccaatttggcagaggtgtacaactgggtaatgcgaggagttcgggtacttccattggttgctattgttgaattcatccttcacggcacgcaagcgtactttagggatcgatacaagaaaattggtccgtccatggccgataacaacatagtgtttggcaacgtagtgacaaagtacatggaagataaaatcaaaaaggcacggagacatcgagttgttgctcaaggcacacaagtgcatcggtatgaaataatgtgtgttgataggagcaggcgtggtatctatcgcaagcaagccgtgcaggaatgtgtcttgaaggcggatggtggatgtacctgcagttgtatgaagccgaagcttcatcaccttccttgctcacacgttcttgctgctgccggtgattgtggcatatctcccaatgtgtacgtctcaaattatttcaggaaagaagcaatctttcatacatggagtgaggagatatatgggttcgggatctcaggatcttacacaacgctgagtgcccaagttttttatattccagatccatctaagttaagggtgaaaaagggtcgacgccaaactagacgcatcagaaatgatatggatgagtcagaagcaggtgggaggactttacgctgcagcaagtgtgatctgcgcggccatacttacaagaaatgcccgaagaatgcagaagttccaagcggcgcagatgctagtccatctggacaggcaagtgatggtaggcgaccacctggtgaaggaacaacaagcaggcgcgcaaggccaaggcgtcgtcgcgcagcaggcgattccatggtgtaacaatgctttcgatttaggaaataaaatgctgttgtgatgtaatgagtgttcggactaaatacttctatcgtgtaatttcaattcaatgttgttgtaatgagtacctccgactattgttgtactagtagtattgcgaactattcggtgttgtattataatgttatcgtgatgagtgttcggactaaacacttttgtttgtttgtactcttgtttaatatgtgttagtaattcgcttatgaacatttattacttatgttgaactaattatttatatgtttctgatcaacctatttgatgcaggtatggcgtacgacacaccggcgctgttgaaccgtgggattgacaggaaccaccgctcgttcctgtcagcagtcgagggtgcacagctcggcaccttccgtccacgcacgtcgcgcgagtggttgcgtgtcgacccccgtcacgttccttggtatgcgtatgttcacatttcaactcaactttgctttgtgttgtacttatgtttgaagtttgctctatacaggttgcgtgcggcaggccttctaccactttgtaggcttgttgaggcggcggcggacgaccgtgacccagcgaagcggtgggatgcagaccggtcactccttgccgctcttgtagaccgctggagacctgagacgcacacgttccaccttccctgtggggagatggctccgacactgcaggacgtgtcgtacctgctcgggctaccgctggcgggagcaccagttggtcccgtggacggtgtttttgggtggaaggaggatatcactgcgcgcttcgagcaggtgatgcgccttccacacctaggaccggccaacacccttcctccgtactctacagtcgggcctagcaaggcttggttgctccagttcactgtaagtaaataagttgttattatcatacatgcttatttgcgaccggatgagtgttttgtactaacatttcattcttaattgtaggcggaccttctgcaccctgacgctgatgattactcggtccgacgctcccttgaggcgtacctgttgtggttgttcgggtgggtgatgttcactagcacccacgggcacgctgtggacttccggctggtccactacgcacggtccatcgcggatgctcagccacaggacgtgccgcagtggagctagggttctgccgtgctagcagccacgtaccgtgccctctgtgaggcgtgcacgaagactgacgcgggagcgatcatcgctggctgccctatgttgcttcagctttgggcagccgagaggtttgccataggtcgaccagtggtggacagcgcaccctacggggttggtcgcagcgcgcagtggccagaggacggtcccacgatggggacttactggtgtcgacgtggggttagtgcaacttcgctgcattataagtttatcagtcgtcttctttttttttcttcacataacatgtctaattccgatcatgtttattgcagcgtcgttacgctcacgtccaggtgagacgtggttacccggacttcgtgttcgagtttgaccgtctccagccgagcgacgtcatctgggagccgtacacagaagaggccgtcgctgcgagagcaccgctaggactttcgtccttgtgcacacgcgaccaggcttactggctcaccatcctgccgatggtgttcgacattttcgttgagcctcattgcccacagcgtgtgatgagacagttcggacttaggcaggtgtttccgggcaacgtgcagccgaccgtcctccctgccgaccactcgtgagttcggattgttcatttctaaatttttatgataattacttcatcgagccatataatttacctctcttcacaggttgactcgacggggacagctagcaggcgcactttgggctccacgtgtacagcagtacgttgacgactgggtgttagctacagaggaggtgatcaacgagctcttcccacacacggaggagaactaccgtgactaccttcgctggtaccttcctcgcactcgtgcgcgtgtgaccttcactccagacgccccagagccgcacgttgccgctgtcacggacgcgtatcccacgcaccgtgaccgagactacttcgtggcggtacgtccaatttgtattacttcttacaattatttcatttatcttgcataatataggacaactactgaattttttatttccatcttgcataggctgatgccgcacgggatatcagtgccgatatcaccgcagtccaagtgaggttgaacagaggtttgcagttgactgacgttgagcagagggtgaccttcgaccggatgcaggagaagatgcgtgcggtcatgcgcgtcttctcctgtcgcagcgccgtggacgtcgtacctccagctggtccggtacaaccacggcctcgcgcgcctaccgtcggagcaggacctcgacctacggcacctgtttcgcacggtactgctcagcccagaggtttcttaagttttgtttctgtttttctacgaaaacatcaccccgtcgtaacttgatgttccatcctcgcaggacctcgtttgccttcgagcgcccctagcttcggagcagtgcgacctacagcaccggtttcgcacggtacagttcagcccagatattagttcatttttgtttcagcttttgcacgaatatgtcaccatgttttaactgcacgtttcctcatcacaggacctcgtctgctttcgagcgcgttcgcaggcacgaccggcgcttccgcgagctccgcaggggcgttcgccacctcttcgggcgcgttcgccagctcttcctctcacggagcgtcgatccctcgcccacacggtactttactttttgttactactgttaaatacttgtacgaaactgatggtccttgtccagcaggatttgcagccgggatcttcggtactggggcctcttcgtctcacgccggtaggactggtcctactagccagttctacgacgacgacttgcacggtgcacaccaccacgacgtactaggctcctctcagcttggaggagctccagaggcgcacactcaggagcaggcagaggtcacacctgtacaggcaggacgggttggccgtgccgtacccccggaccgactcacgtactcccaggggcacattagggcgcagggtaggagggacaggggtaagaggcctcgtcagtagtgttctacctcttcagtccttatgtgaccgtttcttttggcttacaaacttgtaaagcagtactacttttgctattactactacagtactacttgtgtttgtctcgtctacatagttcttttcattcatatggtgctagaacaacttatgctcacgacaacacactttcggcgcttcacggtagtgtcagatccagtagcgcgcacagtccacaacagcacacatgaaaagcggcagctcgagttatcactatcaactttcggcgctgcctgttgacataaaatgaatcacgcccacgcgtgatcgtcttgtcacatctaatgaataatgtatctcattgagttcacatatattgcagtgaaaacgacgctatataattgacaatctgaaggcaacctcttcatatcttctttcccactagcacaccacacacgaaaatggaagcctattcattggtaatacgtaatctagatttgagattatgtagaacattcttcactacaattttacattttggcagcaaaccaaatatgatcaaatgcaattttaccttaccaaatatttggtagtgccaaaacttgcttatattttggcactaacaaaatatttgtacggtaacaattccatgccccccctcgccgcccatttgcaggcggccccccgcacagtataaaatcgccctagcggagggcggcaagggggccgcctgcaaatttcgttgacggccgtcgcccgagagcgaacggccggctgccacgtcattttcgccgccctctgggagggcgatttttaaaaatcgccctcccagagggcggtaggcgactacttccgtcaattttcaaaatggaaaattatttttgtaaaacttttaataaaaaaaattataaataaaaaaaattcgagagacgacggggcggaggtggcgtcggcccacggcagaaaagtcggcccttccgtgctgggttccccctctgttgttccctgccgaaaaaagtccacttaaggtccctctcaactataggtttgctttattcgcttccttaatcgagggtccctcaactattaaaactagtgcaaatctgagtttcttggtgatttagagagcggtttacagtgctgcccctgccgacctccgtaacgcctagcctctcatccacggtcatcgcatctttgtcttgtctcgtctcatcagatactattgtcgtcacaatattatagatgcaaccggagcggtagctagattttcctggcccgatgtcggtagctccccataggcaacaattggtggtggcactccatcgcactagtcctccccacttgtgttgtcctagagtcatactagcggttgggggcagtaaactctcatgccgtatgtgttgatgtccctatggtggttcttatgaagggtccctcattctcatcatacttcatgccgtgttctcgtcggtgacaatgactttgtcataaaaaagggagtgtgaagagaagagaaagtataaggctcatttcatagggttggagcagcgaaaaaaaaaccatattgaaagttgtgtttgaaatctagcacatgtcaagcctgagtataagagcaagtttaatattatagctaacaactaagtccaatctatctatagctaatctaatagctcattcatacaatagttacatactacattattaatacctgttcccacctatcatatatacaatgcgtcttggagtccgtgctacaactggcgacaaatctatagcccgctgctttactctctccttatttatcttcttataatatgtttacagctggcttatagcctgctattgtatctgctctaagagacgttagtatcgagccttttctgtcactgaaaaagagatgagtgttcacgtaattaattaagtattaactattttaaattttaaataattttaaaaaatattgtttttcaaaaaactttttttataaaagcccttttaaaacacaaacggcttgtttcaagaaaaacaatataacctctctttaaacttagagttagacttatgtgggcaaatatttttttcatcctaaaatataacaattttagtgtttaatttttttttcaaatatagcaacttctttatcaaaactttcttttcaactaatcatcataactttccaccattcaattttcttagctatctccacttctcaaccaatcacaactttacctgtttaattttacttacttttaaaaataattttataaaaccacacctattattatcataaaattttcttttattttaatattcgtgtgcaaccctaaaaatcatattagttctcttgccacacaaagccacgccaccgccgagagaaggaaaccggaggcgacgagagggatggcttccacgctgcggcgcgcggccgtcctccgccgtgccgtctccttcgcagcgccgtctcccgccgtccgccgcgccgcccggctcccgatcgcgccgcgccgccccttctcgcagccgtctgcagcgtcaggtgatcagcctcccaagtctgcactcgacaaggtaaaaacttaattccccctgcttcccttgttctcctcgatgttttcttcgatcgtctcaggctttcccactggcgtagcctccgcgtcagcgtggttcagatcagatggaccacacgccggagcaatcaacgcaagggatgaaacattaatttttttttagagagagagagagtgtgtgaaatatttgttagggctgggagtggattctttttgatccaaattcggtacaactagttgtgatatctatcggtccactgaaatcaagttcaaatatacatcgagaaaaaaaaaacaaatttagatgtgaatggtatatgctactgcttatacaccgattttttttatatcccggacgtgtgagttgaatttagatctaaaattttgtaaagttgtgtacatacatcacctcgagcaatctaaatagtttctcatacttgatggaccaaatatctgaattgtgtgggtagatctggcactatttccatttattaaaaatacagcggtagaatttagctgtttaggaaattttaacgaggcaatggagccatcaagtagaaattggttttcattattcacaaaaaaaagttgttccatgcaaaccagaatgtaatgagtagcatcagtcaagacataagccaaaagcttttcagctgtctcctgcattattttttgcacattgcttcagcagccattccatcccatctcgttgcaacttgaaagcctgcttaacccttgtttgtttggacctaagtttcaacttaaaagtaaaagagccaaatccaaaacagattgaggcctccatcgactgactcctccgctaggccaccgccatatctttaccattttttgccgggtcggcaaaaaacgctgaccgtaatatattaagaaattggagaatgtacatcaaattcgcaaacctatctttaccattttccaccggtatgattctaacatcaaggttgccgacactgctctgaatttagtgctcaattgtagctcttgggtcagatctgattttgctgctgatattgataaaagtatgattaagagcctaaatgaactagcagttcgtagtaatataaattagtatgaatgcagcctagcagggtagttgtagaatgcagcagtgaaattgtgttttcatgtggtgtttcagtaatgtggaggaacggtatggtgaatgaataacaataataatattgttgcatgcacattttactttcatctcaattgatttccaagtgctgttgcgttctatgtctgtacattttcgatgatgtgatagtttacagagacaaaagtttcaaaacaccgagtgcaatccattttctattgttaaagaaaattcttatcattagtcatcatcgttaagtatgaacttctaaatgagactatggaagaaaatgagctcataaacaagtccttgcatgcaagggtattttagcatttttcaataatatcacagccatccagaaagggcaggttgccaagcagtacgattattgaaattgttgaaccagtaaaaccctctttccgtcgatagcctagaatagtcagtcgtctctctcaacaaaaggcaatactgtatcattattactatttttctctgttatcctgatatctggtactccctccgtcccacaatataagggattttaagtttttgtttgtaacgtttgaccgctcttcttattcaatttttttttgcaaatataaaaaacgaaaagttatgcttaaagtactgtggataataaagtaagtcacaaataaaataaataataattttaaaattttttgaataagacgagtagtcaaacgttacaagtaaaaactcaaaatcccttatattatgggacggagggagtattttagaccatacaatagttctaaaatcatataatgtatgtacgtctgccagacttgtcctgtatccaacaatgacataaatggatgtgagaacaggcaggtgttaaattagcttagctaaatctgttttcttttttatttattaaacaagtttggatggctgcatcatatggtgccttttgcatgcatgatggaattagtgcatattgtgttgttaggtgctactgccatactttctgttttcttcttgtttcatgcacattataatcttttgcactgtatcaactatgtataataaatggatacttcaaaagaaaggcctgtaggccacttaagaacccacttgacacagtacttaaaaaccttttgtttcaagaatatagccaatgacatctactactgattgattggaagtagtgagctttcatcgatcatgcttcatgtgtggctattgatcaaattgctttttttgttctatagttgaatccattatttgaggaggtcatgagaaaaggagtttgttcgatggatcaatatatgacactttgttcgatggatcaatatatgacactggaaatcgtcaaaaggtgtaacatactacctccatattttaatgtatgacgccgttgacttttcgtctaacgtttgaccattcgtcttatttaaaaaatttatataattattatttattttattgtgacttgattcatcatcaaatattctttaagaatgacataaatattttcatattttcacagaaaatttaaataaaacgaatggtcgaacattggttaaaaagtcaacggcgtcatacattaaaatgcggagggagtagttctttgtcatttgtcctcttccctttttgcaaacatatatatactaatattttctctttttagcatccaacatgctcgtatagagttcaatcgaaaggaaaatgactgaccaggatgggaaggctggaagcctggaacgcaagagattatgacagtgtagtagtctacatctgtgaattaaattactgagacactagcttttgaatcatgctgtagtatgttactagttaagttcatttctcattatcaaccgtgtccagtataaacttaactgccaatgctgctcgatggaggtctttataacatatgatatgtcacttctgctggacgaactatgtatgaaatagatggtagagctaacaagtgtgactgggtgtattttggacctttcacactatttccatgtcatattcaaccaaaaatgaatttcttaataggtgtggtgtgtagcaccaaatatccataatttgagagtgtctcttaaaaattgaccttttttttctgtattgaattgactagtgctacctatgagcttgtatatcttcttgtatatcttctgttctgaaaaaatcaacttatgcgtacaaacctggatatatgccttttcagattcgtccaaaaaaaaattttagactatggaagttgttttcttttgggacaagggagtacatagcaaggggatgatatgtgtactctttttttttcatcattcttgacaactttaatcattaaattaaatagttttaaatgactacttcctccgtattactctccccgttttatattataagactttctaacattgcccacatttatatttatgttaatgaatctaaacataacatatatatgaatgtgggcaatgctagaaagtcttataatatgaaacaggggaagtatactataagtcattttgacctctttttttcaaatttatttaggtttgactaactttatagaaaaattaattagcaacatctacaaaatcaaattagtttcaacatatacattgtatatttatataatatgtttgtttcataatgaaaatattgctatatttttttatataaacttggtgaagtgtgattagaaaaagtcaaaagtaacttatgaaatggagggagtagtttataaatgatttagtttaagtgtacacgtgatgttttaaagacttgctgtgttcggaactccaagttaccaactcctctccctcgttttccgcgcgcacgcttttcaaactgctaaacggtatattttttttaaaaaagtttctatacgagagttgcttaaaaaattctaattaatccatttttgattaaaataatagctaatacttaattaataacgcgctaatggaccacttcattttttttgtgtgtggggagatgggttcccaaccccagtaaccgatcacatcctaatattgctcaaagttactactactactactaaaaagtagaggaaatatttgtaaaaaaaaaaaggttttactatactacttgtgatagtttttaggcctaaaaatttttaaattatggaccgttagatcacatcaagattcgtgaagattagatgataaaaatttacgcaaagagcgtgggagcaaggagtcaaacctacgaccttccgtttacgaccgaacagagctaaccgactggtttagttagaatgagcgtaactcataactacactataattcaagatataaaaatttatatatgttttttaataattatatatgtgttatattatagtgatagtgaaattatattataatatatattatagttggataggttgtatttagatgcaggtgtgaaaagttttgacgtgccacatcggatatacggtcacacatttaaagtattaaacgtagactaacaacgaaacaaattaccgcctgtaaaactgcgagacaaatttattaggtacaattttgtttttgcacccactttcatctccaatatgatcttacccctactttttggggttttcatttttgcccccactttttttaactggaagaggcgtttacccctactttggatggaagttagtgggactaggtatatggcagtaaaaaatagagaaataaatgaaataattttttttgaatttgtgttttacttttttacccctagcactagtctagcactagtctaacagagaatcgattctttcccacaatctcgctgcttctctcgattctacaggcggcaacagcagctagggcgcagctcctcccgtcggcggcggcgagtggcggccaggtggtggcggctagggcgcagctcctcccgtcggcggcggcgatgggggcacgggagaaacgaagctcccctggtagacatggtgcgtcgcgaggagacgtcgtcaccgtcgtcgtcgccgctgagctccctaccggcggccaccacctcgcccctcttgaggttgtaaatcccgtaccaatgggagagggtataaatgtcctatttaacaccgttaactccattatccaaaacatgggcaaaagcctcttccggttaaaaaaaaagtgggggtaaaaatgaaaaccctaaaaagtaagagcaaaatcaatattggagttgatagtgggtgcaaaaacaaaattgtcccaatttattaagcctaaataatctatcactagcaaatatttactatagcaccacattatcaaatcatagaacaattatacttaaaagatttgtctcgcaatttacatgcagtctgtgtaattagtttttttatcaatatttaatactctatgatatgatagagtaaaaatgttttttttccttgggagctaaacatggccttagatttgaaagtttcttttcttaaaagaaaaaagcctcttggcctcttgggcgacagtggaggaggcgaagctccggcggccgaggtgctccggcgacggcgagttccagttccaggtgatggtctctccccaatccccatgttctcggttgatttccggctcttcgtcctcatcctccctcactcacatggctaccttgtgctattagggtttcgtagcaagcaaaatcaggagggccatgtcgtcgtcgtctctgctgcgctcgtcgggcgccgtcgtccgtcgcgctctctccgctgcctcctcctcctcgggacatcaacacgggcgcccttccttccgccgtgccatctcagcggcagccaccgcgtccgcccgccgcggccttgcgccgcccccaaccctgccgtgccgcaacctcacagcgtattcttcctgtgcgacacatagcagtaataaaaaggtgatgccttccatccaccacagtttctatttatttttttcccccggggtaaggttctagttcaagttgtcactgaatttctgcgtgaaggttgacaggattttgatcagatcgacagggaggggattattatatatactctagaaatttaagggttttttttttgtgtgtgtatttatgtttgctctagaacttatagcatcgacatatatcaggaatcagactgactcgatcgctcgccaaaataaattgagtttttagtttggtgtgatgtcgggtcccaaccaaacatgaaccgcggtctgttgttctacacgtatcgatgcatgtaggcctaacttaggagaagaattgattaaataataagtgtaaaaagtgaacatttgtcaatgactaattaagtattacattacatattataaagtttgaaaaatgaatttaccaaattatttcaacaaatgcggatgaagaaagttttttggttgcaaaaaaacattgtttaataacttgggaagcgtgctcgtgcaaatcgagggagttagtggcggagctagaacttttccaaatctagggctaaattagttgaatttatataattttaccggggctgtctacagttcgggcgcccgacgatttggagaaaaaacgggcgctgacgtcaacgcccgatttacgtgcaaaaactatttaaactgatttttctcttaaattacttatccaaatcatgatccgattgcaccattaaattcgttgcaattaaatcttcaaaacaagaccacacatggatatatttcgatgacaatttttttagcttattattgaattatttttaaatgttgcacgatgttcccccaggtatatcggaattgtttcactaagtagatcaaaaatgtttcactcatttaaattgggtgttgtttcacctcatataaaaacaatgtttcagccaatagcgaaagattgtttcagttcactgcaacatttgatccatacatagtgaaacattataagtgcactaggtgaaacattttttggtggaacaaaaaaataaaacgaattcccttaatagagggtttccaaaatatgtgggttttttgtcgcaatggaatatttcggttcactgcaacattagatctatatatagtgaaacattgtgagtatactaggtgaaacatttttggtgaaacaaaaaataaaccaaattcccttaatagagggtttttaaaatatgtggttgatttgttacaggtgggggcaggtattgtggtggggtcagtgacatcaccgtgcgcgcgggggcggggggagcgaccgatttttcctctcccagcccggtcacccgacggccatcatttcccaattttaccttttgtcttctaggttttgaagttttaaaataaaattttaatgaatatttaggagcaggagtagctgcagccctagctgccctactcccgtctgccaaccatccaagtcaaatggggctttgctcgtcctcatgttatgggataagatgacaatttcagtagttgctacttgctcatgtctagatacaggacatttggttaattggttaccttgctagtcctttttcttttgtttgctttaagggatatatagtttgcatctaggactagtcgttcataaacattgtcagcagagagatatttctcacagtaacaggaggtcaggtcgtggagaagttacaatagagatgatgtgttccaagttgtgaaccttgccattctggcatgacgtcacaacagagatcatgtgcccattttatttcagaaacatgtttacttcttctatttaacatgcagggtatgcctaattgtctagtttgatagtaatgctgttgctttcatgaatcctccaccagagtataacggttcaattcccagagccatatttataaataattaaatttcgtttatagaaggcagattgcagttgatgactgtgaattctcaaccattgttgtttgttgtgaaggacgacaagactgatctgaagctaaaaaaacaccttcaagaactggagcaaatgcttgaccaaattgtcagtgaacatgtgaagctgcacagattagtgcacagctctgaccgtggctattttgagaggtattttattcgctcatcaagaatgcatatatacctacactgcttattcattcataacaagtatgtgcatatctgtgcaggcttttgagcgaacatgggtggcccaaatgcaaacctcgtgatgtttttgtttggagatgtaggcttacaactatttttgttgcatctgtcatgatcggttacatgttgcctgaaataggatatccgtcgtaaaatgctgtgaaggaacaccctacatagttgtttgcagtcgtgcagatgtacaggcgatggacacttctcgctatctacagtagtacctaagacatgtaaatgtgatgcacttttcaaatctttctactccctccgtcttattttaaatgcaacaataagtttctacatttaactttgatcgttcgtcttatttgaatttattttataattagtaagttgtgctataaacacctccgaaaaataagcaagttgtgctactcacattatggaagaacttggttgctatatacttctcatctcaaactataaacatttttttatttgtatacaagagataaattttgagatgaaaatactatagtacccctcaaaaaataaataagggatatgtattcgaacaagattcgaacgagatgtttgatgggacaagtagtattgtaaatactgctataaatcatcctattttgaagcaaagattaaactattaaagttcttatattttatttaaaacagaggaagaggaagtatttttaccctatctaaccaaacaaacaagtagcccaacctaacatgtaacagcccacgacgatgcaatccattaggtagggtaaccctacaatatatgctatcttgacttttggacgagattcatcttattcacatattctttaaacgaaaaatatataagccaggcttaaaaaacatttagtgatcagtcaattcacaataaatatataataaatatataatgttttaaataaaatgaatagttaaacatgttaaataaaaaaaacaaccaacgatgttaaaacggaaggggtaccttgctgcctcccgggtgcgatagtccagccgcatcggcatctacaaacgcggcggtcgaggcgaagaagctcctggcgacgaccttgctccggtgagttcccggtgacatatgtattcgatcgatttcccgttcttcttcccccatgcatcctcctccttcacatgacggccacatcctgctgctgttaggacgaaggatcggagatgccgtctctgctgcgcctgcgcccgtcggctgttcttcgcactctttccgcgcccccgtattcttcctctgcgacacatagcagtaaaaaggtgaagcctttccatgcatccactcgctcctaatttccagttaaaattgtcgccacctaatttatgcgtgaaggaaaggctggctggattttgatcagatggagaggaaagcctctagcataaacttattttttgatgcatcttttttttttgacgcgattattgatgcatctttacattgttaatttgttattagtaatgtatactccctccatactcataaaggaagttgtttagaataatgtttaagtcaaaccttggaaatataaatcatgaataactctcaagttgttaagtttgaaaatataaaaattatatgaatagatttgttttgaaaaatactttcataaaagtatacatatatcacttttcaataaatatttatagaaaaaagaagttaaagttgtgttttggagaccgtatcgctgtcctaaacaactttctttacatatttgtttcagccgggaaggtacttgctttattttgatgttttgtcttggtaactgagattcagttcttcttacaagtgttaattaaggctattttggtaatctggaatcaagattgaagtgattgaatagagttcagttttcctggatgaaattattacagtgtaggcctatgtaacacgtcaacaaaacttagtgcagcaggatattgaggcatagctgggatatttttttgactcaaataactgggatatctcgacactggagaatttattgggtacatgaattcttacttacgagttaggaacgaccagtcctgacgtaccttttgtcatcgaaaaggaaaaaaaatatttgctcaaataattctgctctagtctaaccatctctcccctagccctccgatggcagtcactccattgagtattatggtccataactggaacatagtagtggttacctgacatcctgataaggaacatggccagccagtttgggtagatcaaatattcaaatgcaagcgtacaattttggctgtgtttagttcacgccaaaattggaagtttgggctgtgtttagttcacactgaagtttggaagtttggttgaaattgatacgatgtgatagaaaagttgtgtgtgtatgaaaggtttgatgtgatggaaaattggaagtttggaaaaaaaactttagaactaaacagggccttgattgaaattggaatgatgtgacggaaaagttggaagtttgtacgtgtaggaaagttttgatgtgatagaaaagttgaaagttcaaagaaaaagttaggaactaaaccaggcctttgtgaaccttttctaagtacaaggaattccatgtttaaattaagggaaaatgcatgttttacaaggaattctctttggctattttggcggtccttttgttcagtgacacagttatttctcttgcttgtagttcattaccccatgatttccactttttctatattaggtaaatggtgatgaaagattctatgagaagaagcaacaaatggatccatattgaaattatactacacttgctctattgtttttgctaccattacttaacatgtcttgttaagcctgaatcccctactggtctgatctgaaggctcctgttgagcggagcgtctctgacatgttcgcagcatccaccttctctatccttggagatggtcagtccacgctcttctggactgatcggtggatcgatggtcgctcgatagcttctatagctcctgacctcctccacgccgtgcctccacgcttccagggatcgcgcacagttgctgctgggttagtgaacaactgctgggttggtgacatacgtggcgccctcactgtcccggtcatctctcagttcttgttagtctggaacgcggtgcttcctacccagctctcgctgggtgttgaggatcacctcgtctggcgttggacgggtgaccagtgctactcagcgcgatcggcgtatcaggcgttcttccttggccagcactcttttgcctgtgccgacttactctggcacgcgaagggccctgctaaatgcaagttcttcctttggtttgcatttcagaagcgttgctggactgccgatcttctccaaaagcgtggtatcgatagccactctgcttgccccttttgtgctcaggagcttgagaccgcgaaccacatcctcatcgattgcgtgttcgctcggcaggtctggctccgtgtgttgtcccctcctggctgggctgccctctctccccctcgtggcagctggctccaggattggtggtcatcctccagggtatgtttacctgagcacctccgcagcggcttcgactccttggtactcctagtctcctggcagctgtggaaggatcgaaactccagggttttcgactctgcgctcgcttcggtcgcagtggttctgaagtccatccgctcggagggccagctgtggtctttagccggtgttactttttttggggatttcttgggagtgtagcgtggctctgccccctcccgctgtttggagttgcgtttttaactgttgtagtagttcctagcttcaagtccccccctttaggcataagccagactagctaattgctttgtgtaacaaaaactcttttcctgctaatatattgacgtgcaatcattttgcgcgttcgaaaaaaaaagaatcccctagttggtgttgaacatttcagctgaatatcatgaatgaaaattatttaactagtaactattgtggtgttatgcaggtgaatgagccacttgatatgaagaatatagaccttgcgttggacaaagtatttattatatgtgggggcattagaatgtaagaattcatccctaatccatttatatgcactcttaacaacatcatcaacaaatccttatacattcttctaatactattgaatgtatagtcttgctgcagagagcaagccacggagtctgtctgcccagtgggcattgggtgttagtcatattcttgttgttggggcgattgcaaaggctttgaacattggagatcgagactcagccatttgataatataataggtattgttattattcctctctttcacattatactacactttgggttttcaatagattcatgtatatgtccaaattcatataaatattagtgaatgtagataagggatggataggctaaaatgtcttataatgtggaacggagggagtacttgattgtcttttaaatataatcttttaggactagcttatatactaaaatttttccgcatcatataagaaatattatggcacacataataacattgatcgatggccttaatttgtttacccatgcagacaatagctgacctgtcagagggtggaaatgcttcggtgagcagacgtggcgcactactaatatgatggatttacagcaatgactgaaacttttttgctttgcttgtgtttggagaataaaatcttacctttggactttggtcatgtggtgtcctcttagaaagtataaggggtgagctgggacaaagggagaaggggttaggaggtcttgggttaccaaggagaaacttcaacacatttacttaagttcttatgaaatccagaagagaaaggaagagtattctgagtagtggtaaacttaagatccttcaagccaggagtacgatattacacctctgggtagcccgaacctttacaattctttgtgttcatctattattgcgctccaatggggctcaaactcctcactcatatgcgactagctccccaactgaactgaccgaaagggtcccattggatccccaccatcgaggtccataccctaacaatatttgtctcaaagtttatgacataataactcgcactatagtatgtagacaatgtacatgacctaatggcaccacatgcgatcggacgaagcagtgacgatgttcgcatgcctagctgcgtccattcctcttattcttccttggtttagggcttcaggccgagcaggcagaggaagagcgagcacatgacatcggcgtccagtggcataacgacaatgatggtggcgcctcgacgcattcccgaacacgatacgatggaggaaggtggcagccagcatgaggattgagggaagagttgggaacgccgacggcaagaactcagttcgataggaaagagaaaactccggagtggcttgatttgaggtaggagagaagggggaaatggggcaaaatgaactcgccggagtggggagatgctggtggcgagatacgctctaggggaggaggatatggtttcggcagtgccgcgatgacggcggcggcgacgtgcacatgacgcgccctccagaagtaaggaggcggttggctcggctaggcctcggcttagttgggccacggcctgactaggccatgtgagggagagaaggccggaacggcccacacagcaaggggatggaatcaacgcaggagggaaatgaccggttggaaagatttcggttcaaaagaaatagaagattttttaggggattattttaatagaatctaaaagagatgtagttaaaacaaagggagatgtaattcaaaagaatttgtttgttgactatttgggaattggagataaattttaacaagtagttcatggactctatgcatgtgggggtttttggtttatttttgaaaatggatgtttaaagggatttttattttggggtattggtttaaaggaggagtatttgaataaagtaacgtgtagtcaatggactctatgcatgtgcggtttttggtttatttttggaatggaagtttaaagggacttttattttggggtattggttcaaaggaggagtatttgaataaagggatagatatttgaatttgcaggagagagagtgtttggtaggaaaactttagaatatcattggaggtgaaaattatggaatttagatgaaaaagggtgatggctaaaagaataggttttagctaataaaaataataaatagggatgtttataaaattggggagagacttgaacacaagtatacagagatgtctggctttagaatatttatgagaatgggacttggtgagtttggaagaaagaatggttaaggaatgaatggtatatcgagaaaatttttatatgtggcatatggaattggagcttcttcagaagtaaaccaaaaaggatttgaattgatggatttacgaagactcggtcaataatttgttggtggagttttacgcggaaatctataggattccgaggaatttgggtaatgggaatttaaaaggaaatatatgcgctaataaaatagggtttcggtaaaaaaataaattgaaaggtttataaaactaaaaagaaattaaacggggtaaattaccaaatcctcgactattaaattatttatttagtttagacgaggcatcttttctagtatcgcaaatatatatacagattctttttggtgaggaataggtatatcaaatttacagggtaagatatatatagattatttcacatgtgatgtaaagccacaaaaatatagatataacaacaatgaaaaagggatttatgggccaggccgaatcacggcaaacattttggcccaatagtatagctggaagccatatggctgcgaggtgaggtagcgaagctcgattgcgactttgcgaggtctaccatggcggcgatgcgtcgtttggctgttgcttccctgacgccgccgcggatccctcgtcttctccgtctccgacgccccgatcgaacgccctctgctttctcgacgtggactcctcatcgtcgtcctcgtccccacgccgccgatcccacgcccatctatctgccggtgcatcgatccgtcccctcgtgaatgcctgccatgacgacgatgccatgacgacgatgcgaaccctttatattattattattttttagagaaggatatttttttttatccggcctttacatccaattggatatatacgtatgttaaaatagggaacttagtctcgtaaacaacccaatctaaaattcgttcatatagagatttgaactcagaatcttagaatactactcagtcgtcgacgaacccttaattattggttgaggattttaattttatcgcaggcaattgaaaagattgagaagatgaagacggtttcttctctgaccaaggatgccttgaaggttcttcaagacgctggggacaaggccaagacgcatctcaggatcatgcacaaccagtacattgaggagtacgtactaactgtttctactttatccattacatcttgaaaaaaaacaatctgttttactccagcaatcagtactgaccgtccgcatcaatatatcaataactttgagttatcgtgaaagtactctccgtttttaatagatgacgttatttttttatcacacgtttaatcattcgtttattaaaatatacttcctccatttacttttaatagtcatatttcatcttagcacacagactaaggataagtaaatcaacttatcatccatattaaacatgatactagtcatttctcgtaaacaatcgatttattaatatttacatttatcgatgcccatgtagccaatcttatgtggaagaatggagagtcacacattaaatccgagaaagtcattaagatgataagattgttggattgaaatatgcctatcaaaaataaatttttcagatttagaaatatgactatgaaaaatagatggagggagtatatataattataatttattttattgtgagctgttttatcacttaaaatacttttaagcatgatttgtttcttatatatttgcataatttttaaataagattaatggtcaaatatatgtttaaaagtcaatagtgtcatctataaaaaaacggagggagtaagtttattattaaaattacagagttaaaaaagcacaatactgcaaatgtcatggaacatttgacagtacccaaaaaaaacaataattctgtgagacataagggaggagtgtaaacatggtaactgttaccgaaagctactctgtgaaaactagcgaagataacataatgtcacctttttatgtcttatagtacgaatttagttgctagaacaacagtaggaaatttgtttcagagttcttgtgtagggttaaaactctcagtgggcaatggtatgttacgtaattgttggaaatactgaatgcttatatactgcttacttttaagcatctgcatgagcagattgaaacaattatgatttgtagcatttgcaggttttgaccattttttttcttgccataatttacataaatacgtttttagctatttaaacaatttgggatgtaattctcattctctagccgataaaataatttgagatgttgccttgcagggttccaataatggaaggacttatgcaaaatggctggctacattttgtgtgttacattgttcctgtttctctgccttcttttgttctggttgtcggtactagagttgtcaacataatcaacgaacgttctcattctcatttggaggaaggcataaagattccatttcaggacttggaaaacaagtaactatatatatcttggtgtgttttgtacttctgtatactgataagaatgatctgttagtattaaaaagaactttttgaatgcattctcatatgtgttgttggcgtgtatgcaacctatattagttatgcatggcagacccatatgtttatttacgttttcttaattaggtgtggcatttagttttattgataattgttcgacaaattaaacttaaaaactggtatcgtagttttttttttgaacttttgcaatcatatatactcattttgggtgtgaagaagtaacaagtcgttaccacttttgcacccttcctttagcagcttcctgttaatgtcagaagcttcctgttattgtcagaaaagcagtgatcctatcttgcagccaaaaactccaactagcatagcagctttctcctcctcgaaatatataagtgataattctcctcctcataatttgtaagtgataattctccttctcatgtgttgtagcattttgatatctgcaataataaagccttgagggtaaaaagttcccttccaattgccttcacatcatctgcaaatgcccatgatataagcttcattaatgatagcttgcaatagcgcagcacccaggaaaaagagcaaaggtgccaaatgatcaccttgcccaactcctcttttacaatgaaaattcttgcctaggatgctatattcatcaagactgaggagtaggtgacgagaaaaccattttaatccaaacatcattaaaccccacggcttgcgttagttggagaatggtttcatgttcaattgtattagagatataaatagttgtacaaatatctactcccgtgacctataagttgcaacgggtgatttataaatagttatacaaatatctactcccgtgacctgtaagttgcaacgggtgatttataaatagttatacaaatatctactcccgtgacctgtaagttgcaacgggtgatttaggatataaaagcaaaactaaactttctagcatggctagttgattaaagcatataattacatctgcaatactttgtgttagaattaatatccacagaatattctcatttcattataggatttttatcaagataattatcagcgacccaagaaacaggatctcctaggcagtcggtgcgcaccatgaaggtgccacatgtcactttatctagctcatgatccccattcaggatcacaattggagtggcatatgacccatgtcggagcaagagggacgcaccccgagggatgaatccttgggtccataaccttgccccatttatatttgagaggacgattatctaccgaggggaagcatggaagacagtgtggcaactacaacacctcttcatggattgcataattttgtggcaaatctaggaaggtttgctcacctggctgaattgtgatcaagcatggatgtcataaaatcctgacaaatcacttgattggtgggaagcaacacggggagaaaagcaaaggacaaatgcaatatgatcatgccttatgcttattgcgtgggaggtttggtgctggaggaatagaagagtcttcagaaattaggagttgcttgtgcgcctctcatgaaagagactttgcaatcgataacaacaaattatcataggaaaaaatttcaccctaaaacaaaacatatttatataaaaaactttaacaacaagtgctcactcggaacatagcatttttacatttcacaagatataacttttgcattaaagtctctataataaagaaggcttaaaaacaactataaaaaaatctacaaaaaaactttaatactaatactttctattgtaaataatattctatcaattggctataacaaatcatcttcctcaactgcgcgtgacaataacatttgtccctcgtcactccttcgtgctgacataggtgacttgaggaagctcggcgtgcttggcctcgacgacaccgatgccgacgccttcttgccgcccgtactagtgccacccatagacaacgtcctcgttacattcttgatgttcttgggcggaggcctcaccaccggcgactcccctgtgccctgacccagcatccttctctgatcctgcaacaacaatgtaagtataccctttgcccccaaaatataatttgaaccgataagatagctatattttggacagagggagtaacaatctttgcactctactaaaatatgcatatgcaactagtagtaccctttgtctctttctctcctgctctttctccttccttgtattgttgtactcctccagcatgtccaggagaccatcctacatttggaccatctcctttgtcagtctggtcaaattcccatcaggtaaagaacgtccatgggagcaacattcacttacaccatcgtactcaaatttggcacccctctccttctcccaagcaattacctttgtgatcaaggcctctgccattgctgcaccctcatcaagttcaatgatcaatattctcaatttccattataagagacatgaaaaaaaaagaatagctaaagaacatgatcaatcacctggcattttgctgaccaaggcacgcgctttctcggcacgcttcagcacaagatgagtccctttgcccacattgtatctgttctcattctgaatatgcaaaccacatttgtaagttttagaggtgtagatgctgatatggcatcctttaagagcagagaaaaattcagaagtcacactctgttgtactcctcaagccaagattcctcttctagtgcagcctgccatttctccatcttctcaagaacatccttcctgctgaactcctcatctttggcctcagagatctgcacttccagccgctccaggattagagaccgtttggcatctgcaaaacagtgtcatacatactctgaagtctgaacaatacaataaataggttctacagaggcagtacagtcttgcatcgcatactactgataatgcttcaaatctttttgttttttcatgtgcttatgacttcagatgcatcactagaaacactgtgcatttgttaccactgcagctgcacagaaactagggctcccagccaattattaccactgtcgatggcgtcgaacatcatcatcgcatcgtcttcgttctcgacgggtacatgcgctcgccgtcgtatctcattgagctcatcatacttcttcagtacaaggtctttcatcctgcactccttgagcctctccagccttaccacctctgcttccacctgcatgatcacactctcagtatcaacagctcaaccaaattctcaccaccaatcatgacaatgacatgatctgatcagcaccaacattgttgatgaattccatggagagagcatcccgttcggtgatctcgtcctcggacgcggcgatgttgcacgccacgctctggaacctcttctgctcctccgatggcgtgtccatcaggttccacagatccagcatggtggccaagaggtcttgcagctggttaattacagcaagatgatgaattgatcattaattctccatgactaatcagttattggggatgtataattcaagccagcctcaccttctgcatcctgttccgtttgatctctctcaatctcccgatctcggaaactaatcttgcaattgcatcgtcgctgatgtctccttcatcatcatgatgaaggttggtctctctgaaatccatgccaagaaccaaggaggaggaatgcagagaacccatcagctctgtcatcttcctgacgcgactatcctgccaaaaacaagaatcatgccggtaaacttgactgaattttttttgtgttcatgctagaaactcaagacaagctgtgttctatgcaaccaaaaaaaatattgtctgaaccaaccttctccagctgcagatcttgcaggtatgctctgagctcctcaagccgtctgatggtgaggtcggagttgtccatggtgagatgaagctgcttgctcggcttcatctcctgctcgatcctgttgatgagctccgtcacctccgagaatttccgccgcctctcctccctcctcctcctcatctcctccagctccggcgtgatcgagccgagctcctccttgaggttccctgtgctctgatcaatttgcccccaaatcgatcagatcaagaagaagaagaagagatcgatggcgatgcacgggtacctgcagcgaggagcacgcaatgtgcacggtggtggatggctcgccgatggtggcgcagatggcggcgacctcggcgacggagtcggctatctcccgttgcagctgtgccctgtactgcttcacctgcgccaccttcaccctgtacacgttgaggcaatcctcctccagcgcgtgcagcatctctcgccgatcctcctccgcttccccgatctggtcccacatctcctgcaatgcaccaaacaaattaatcgacgattctcaagaaccgatcgcattcgccattgctgacgtcacggcgttggctttgcgtaccccaagctcctgcaggagcatctcgcggcgaggctccatctggaacgggaagaggatggctcgcagcttcagtgaaaccatcggtgtagagctccgccgtgccgcgtctgcctcatgcttaatctcctcctcctcctcccgcgacggcggcggcggcggcggcggcgattgagatcaagaacgcatcaagatcaacggaaagctcgagaaaccgacgaaatgcagctgtgctgcatgcacggatcatggccagaggagcgatgatggtgcgattgcagcatcgatcagggattgttcggggggagtttgcaaatgcggagaaaagcgcgggagaaagagaggtgagcaggaagaggagggcgcatgcatcggtttgagtggcctacaattagggagagccaacaatggcataaaaaaaagcaaaatgaaattaaagcttgtgcttgtgtttaggccccaaatttgaatgtggaatttggagaaatataaagtgcgagtctggtagaaaagtatatgaatataaacccggttcttgaagaaaacatacatgataaaattggagccttatcgtctacttgatagcttattgagccgcaaccaaaaagttaaatttcaaaatttatttttagagtttttctcattgtagcccattacccaacattgctttttaaaaatgtagataacaatcaaagttggatactgatgatcaaaatttagatagggaattatcctcgaaaccgttaagtgaaattgcatgcaacttttagagttgatccaatcaaaattaattctcatgaaactgaccgtcgactgccgtaacttttatacatacctttaactatccgtcttactaaaaaaaattgtgtaaaacataaaaaaagtcataattaatgtattattaataataagctaagccacaataaaataaatgataattatatgcatgctctttaataaaatgatgatcgaacgtatctttaaaatgacatcatatattaaagatcatagggagtactttgcagtgccatgcatccaccaacatctcatatcggtgtagttttcatgccattatatctcgttgaaagcgtcaagggtcttggcggcgatatgtatgacctgcactccatatatgaacacacatatatatccaaatatatgtctcctacaaattaagcttaattattattgctaatttttctccacgcggagttggactggagtcaccatctatcctgtagctaggcaagaacgtcgaggagagagagagagcgatggatcgatggagacggaagagatggccgagctgtgtgttagttcacgctaaaattagaagtttgattttcccgtaaaaaaattagaaatttgattgaaattggaatgatgtgataaaaaatgtgaaagtttatgcgtaggaaagttttgatatgatgaaaaagttagaagtttaaatgaaaaaattagtaactaaaccaggctttacacaccagcagcgacgtcaggatggattcagaagagatcgaatgcagttgcaggcttgcagcgattggaagcttcgcagctttgatccgtccagactgatttgaccgactcactgatgacttgaccccctcccctcaccgagtgagatctttgtgtgtttctgtacaactatacaaaactcatggtcaaataaacacacacgcgcattcaactatatacgtacgtactcaacacacgtacgggcgcataatttgttcatgatcatttcgttgtactgtttgacttatttgactcatttcacatagagctcacctttcttttactagacgatcttgtacacgcgcgtgcatctgaatcaagagaaaatctaagaaatatcattgacaagcgtttaattttaaaaaatatcaccgataagtgcgagttccataaatatcatcatacaagcgattttgtctcataaatgcaatcgtcattagggttccgttcgtcccgcgctgttaaatgcactgtgcatcctatagcacttaacgaagggttgctaacggaaccctaacggcgatagcatttttggaacaaagacgcttgtacaatggcatttcatgaaacctacacttgtcgatagcatttcatgaaattggacgcttatcgacggcgtttattggattttctcataaatgaatggcatgtgagctctacgagtactagctaaatgttcgtgcgctcatagaaaaaaactttgattttttttctcgagggtaggacttaactgctgaaggatacaaatttttcaagagaagctccagctataattttgtgttttttaatatactccctcagtttttttttcaatatgtaacactgttgatttttaatggacggttgaccattcgtcttatttatttttttatagaaataaaaatatatgtcatgtttaaagaacctttagtaataaatcaagtcataacaaaataaataataatttgataaattatttagataggataaatggtcaaatgtataaaaaaagcaacgatgtcatatattaaaaaaaccggtggttgtatttttttttaccacttgtggggtagttgcccccagtgtgcacctacatgaaatgttttgtcatcgtatagcagaggtcagaggatatgaggagttgttattttgttaataatgttgcgttgttatgttagacgtgtgggggtttgtttgtaaaggcctaaaggggaagggttttttttccccttgacctgaccttatatatgcaacttgtgaaaagaaattatgggaaaataattactatatagtagtagcttaaagcaaagagacgtacctcaactctttcaagtgcctctagcaaggaaagagctagtggataaaacaaagattatgcaatttagccacgaggatgaataggatagtgtgatgatgctttctttccagagaggactgcagtggaagcatggaaacaaaattaaaaacatgagaaagaaaggtgcacttaaacccttttgattttgtattgactcggtcaggtcagcattttaaagatcctgatgcatgactgatgaaagagttctatgcacttgatatcccacctagcccccactggtcacagcactggagaatttttcaacttaattactctctttttgcctggtatacatcaatcaatatatctgaatccggagtttcataggaattttcaacttatggcccattcatgaacctgagtttatgacaattatccaatattagaaagttgattagtgaattttaaaaggtttttaagaaatgatgatgtaaaccttttttttaaaaaaaatcataaccatttaggagtttggtaagcatgtctgtgataatctgatgatacctacatggttgtatgatgtatattggacaaccacaaaataaatctaagtacactacgatgtaaaaaaaatgtagatctttggtaccaaaagccaaaaatattcttcaaggtctgcctgatcattgatcggtgcattagcttaggtgtatttgagaggagtagaaaggagaagagtacaaaaatacgtaaaacgagatgaatcatcagcatatgattaattaaatattaattatttcaaactctaaaagtggattaatatgatctttaaaataatgtttatgtattttttttataaaatacacgttgtttagcagtttgaaaagcgtgcatatgaaaaacaaaacttttctactctatccactcatatcaaacgcagttaatatcttgaactacaagagactagttatccctgatgttcacacattttatactagtgattgtagtgtcggacgctatagaaaatgatgtctattttgaccaagactgcttccaattaggaatctaaattgtagtagcgtggaagcctgcaagtcaaaacaggccataaccacaaacgaaaagatgcttaatacgccgaagagagtatcttgacacgattgatagtgagttggaagaaatcaaactaattgttttaatatactcagcactcatgtttcttctataggcagcagtggagaattgaccaagattgatagttttgtcaaagctaataatatataaattctgtactagtgtttgtgtaatctatctccgaggaaatttggaactaagtggttgctggtagagaaccacgccggctatggatggtcctagctagtctaggaagacattggtgatataaatcattataagaattgttagtgtatatgcatcactaagcatatggtgaaatttttatctatcaaaattgatgatgttatatgtcaaatactttacaccattcgttctaaaataaataagggcttgttcgaaatgtgagatatataggaaaaatattgaaatacgaaaaacatagaataggattgcatgcgtaaaatataggaatttcttgttcttcgtacacgtgattcttactacaaagaggctagagtggattcttttttttttcatgtgaaaacatgggcagggaatagtgttcctctggaattcaaggtagtaaaccctttgaaacggatgcatctacagtacccaattcaaaggaataatcaatcctccatttttccttcacattttctccattctgacgaatgagccctaaactcattgctacgaaactgaatataatcttgtctagatctgttgctaagatttaattctttttggaacggatagaataattcattgtactagacaatgttcttttcgacttccaatagcttattggaaggagtcacttccttgtttaccgtgaacatacttcatagattattgaacggagtatttttaaaacttttcatatgtgatatttttttaaaaaaaatcaaataaatttatttttaaagtttgcgatggctaatattaaattaatacgatggttatttctcttgttttgcatgtggcttataaggttaaacgaacccctatatcaaatggggcctagtatagaattgtacattgaagagttcatcaagtgatctgtactatgtaataccttttacaatattattgctttcagtttttatatcattctaattgattctgatagtgcagcgcaaacatcaaaaataacactaaccatagaagctaaacttagctaagtagctaactaatacaataacaacccccttgatatagacacaagaccaaatcctaaaaaaaatattggtgccttagaaaccaaatactattactcaattatctcgatataattgaccacaccaagtaatttatattatatcaacataaatgacataacgtagtaatgtaaaacaccgtatgaaaacaacttcacgttgtaataatttattagtactagtatattgcatctatcctatataaaaaaaatcaaaaacaagacacacctcataccaaaaaaagttaaacctataaataataaaaagaaaaattgctacacgtactaattttttcttactaacactgatgatttttatcaagataattatcatctcaagataatacgtacggaattttataacttctgtttatctaaatcaaacggttaagataattattagtaaaaatatagtaagaaaaatttagcatgggtagcagtgctaaaaaagcacaagaggtataaaaataaagaaaaaaaaccaacagcaagagaagagaggagaggaggtgtgtgtgtgacagtgtgtgagtgtgttgacaatagacagtgttgaccgggggccccatgttgaccgccacctcacctcctccccttcccttccccttccctctcccctctccctcaccttcctctccaccttcctcttcctcccgaccaaacaacctccctcctcctcctccacctcgtcgtcgtctccgccgcgctgtctcctcctctatataccctcacccacactcgcacgcgcaaacccaacccccgcatatgcttaactccccaacccaaaccctcctcctcccccatgggcgcgtgcttctcatcccacactgcgaccgccgccgccgatggcgggagcgggaagcggcagcagcggaagggggatcacaaggggaagctccccgatggcggcggcggcgagaaggagaaggaggcggcgcgggtggagttcgggtacgagagggacttcgaggggaggtaccaggtcgggaggctgctcggccacggccagttcggctacaccttcgccgccaccgaccgggcctccggtgaccgcgtcgccgtcaagcgcatcgacaaggccaaggtactactaatactattactactggactttgacgcttggtctgtgtgattcgctgcggtttcgcgggaattcgggagttccatttcggattgagctagtgcgaattggttttgtttagattgttttctcgaattttgggcgtttagctcaagtaaaattctgattcatcaacgatatttttggttgttttgggtagtttagctgtcggtgaggccctacactacactcctcctaatcatatcatttatcgtttagttggggatttcacctcgttcaattaccccctgaaatggcaaaaggtggctctctttgaaacggttacgatgttttcaattttggctatttgcgcactactcgccaaatctggtgcattgtcatactaatttcagctgattgttgcttcttccttggcgcttgcttttttttagtaaacctgccaacttcgatccattttatgtacttaacatgtaaatagttcacatagagcactagtatttgtggctcttgttggtgtctccagattcatctgatttttttttcatggagatatttctcatcttgacagatacctcctctaggtgttcatagtgtaactagattttctcttgataagaccagtcaggaaagccaactggtaatggaaaacgtgtcattgtattcttctacggtatatttgtattggtggatggcattttcttcattccacacaacttgaccttgtaatacatataccaatcaacacggcgttgattttgtcaaaaatactttggacctttggttgaaatttaagcatttccttattaatgcttttattaaaatgtaaatttatggaagaaaaggccacttactaatcccagataatttttgtagtaaattagtatcatagttaaaactagaatcagatctaaatgctcaattttgcctgtggcaggttaagtgactgtgttaacctgtgtgatttttttttgggtgggaatatgcaaaaaggtttgtgcatctttgcattaagaaagagagtttgatacaatccgccatgctaggtagcaggccacaacattaaacagattccttgccacatcagctacgacctaggagagacagcagcatgctgctcaaactcagcctcggcatcctgacccctgcagttacccacagctgcacttccttgacgatagcttggatgagctgcgcccaatccctatgtgtatgattgaaaactcggttgttgcactctttccatatcacccaagccaccaggatgacaattgaatcgaagcctcctttttgggttttgttgagtcctcgatacgtgttaaaccaccatgaagcaaagtctgtttgccggactggtaggtgttgcggtatctgcaaagcagtcaggatcacccaccagacctgacaggacttggggcattgcaccagaatgtggtcaatggtctccacttcttgatcgcagaagaggcaattccacctgtgagaaaatcaaacatctttgttaaggagtgtaactggagcaccggctattatgtttcaaactataccaatgataatagaacaggctagttggactgtgtttaaattctagtttcacataataacctttgtagacaatttggtataactaattcactcgttttcttgattgtgcacagccttgggcacaggcagctctaggctgtatgatgtgcagcttgagttgatctactacttctgttgcacacatgatcacaattttataacatttgtgtccttaccaccggcttgcttcttgatgtttgtgggatgtggataaaataatcataatgcatgaatgagcttgcataattaagtgaagataatctgttatatttaaattagagtagcacatgcaatcacctgtctgtacagtagatattgcgatgttcatccatggttggagccttggatgcatgctctgtatagatgcttttatgtttgtctactctacattatctttaggatatgtgattgaaggcgatttgaattttgatattttatggcagatggttcgccctgttgctgtggaggatgtaaagagagaagtgaagattcttaaagaacttaaaggccatgagaatattgttcacttctacaatgcgtttgaagatgactcatatgtatatattgtgatggagtaagtagttatatactagcttctcttacatttcgtgcacaatgttatttgctatatacactccttgcacttacattttatttctacctaaatcctaatacgtctttactgccagttgcattctctatcatttgtttacagtatatgaatatatacacagttcttccaaaatcacatctcgaattcatgtcttcatggcaataaccatttatatggtcagaactcttagtatgctttaccatttccccttgctatgccccaatagtttccaagattatctaaagagagtatgcacgaccacatatgatttccatcagtcatacggtaccaacccttgcttcctttctatttttgcagactatgtgagggtggtgaactattggaccggattttggcaaagtaagattagatatatcctccatttcttcttctgtagttgatacattttcttctatctttttgtgtcatcattctttagtttccattcccgtacagcttctagggccataaggccattacttactggcaccttccattttgtcagaaagaacagccgttatagtgagaaagatgctgcagtggtggtgcggcagatgctcaaagtggcagctgagtgccatctgcatgggctagttcaccgagatatgaagcccgaggtagaaattgaacgctttcaatgtcttggcaattagtgtacattttggtgatatttcattacttctcaggtcatgtaagaatgtacctattttccttcccagaacttccttttcaaatcaaccaaggaggactcacctttaaaggcaacagattttggtctgtcagacttcataaaaccaggtatttatttcaagagcttttgcttatgtgcatctttgctatgtgcttccaattgttgcttctgatttgagtaggacatacaagtctgcagttcattcattgttttctttcattactgtagggaaaaagtttcacgatatagttggcagtgcctattatgtagcaccagaagttttaaaacgacggtctggccctgagtcagatgtttggagcataggagtcataacttatattttgctctgtgggagacgccctttttggaataagacagaggatggcatattcagagaggtaagtgatgaactgttcccaagcttttgcttcaagcaaaatgtgtttggtgagagtgccaaccttttactctgttgtcggtgtgcttatgtgatggaggaccagtgttatctacatttcttcaagttatgcggcattgttaccctgttaacgatgtgtcagtttttataagcatagcttgtattatttttcacacggtagggcacttggctacttggtcaggctgtccttgagtgatgtctgaactagctgtctaaaatacagcctcatcatattttgtgaatgctactccctccgtcccaaaatataagcatttttagctatgaatctggacaactgtgtgtccagattcatagccaaaagttgttatattttaggacggaggtagtaatgttatgactattagagtgagtagcaaaattgaacttcacttctagtttcaattagtatgaatgggcaacctgtggttccaacagccttagcaaccaatgttccagtgcttagttctagacagctggcaccatttgagtatagaatcctcttaggaccattattcccatcagactatgctagatttttttttttgaattacgtgtatttacagaaggagaacattttcagtcttatccgtcatcttgccgtatgtcttctgccagcatatgccacgtcagagaacatttccactttatttgttgaattagaaaataacgatacagagaaaataggcattcaactcaacctgtgaatgcagttacgtacttaggtagtatggtttccctcttcaatgaaccagcattttgttgtaatgctgattatctttgtgcatttaaatcaacatagacatcttgtggtgtacataatcttctgcatccccttgccttctaataatcaggtactaagaaacaagcctgattttcgtaagaagccttggccaggcatcagttcaggtgctaaagatttcgttaaaaagttacttgtaaagaacccaagggcaagattaaccgctgctcaagctctctgtaagttcctacatctaatctaagatagtcttaatacaatagtagtgaatcttcgtcagctgtcaatccttactgtcctgtttatgctttgatatgtttagcgcatccatgggtaagagaaggaggagaagcatctgagatccctgttgatatatctgtattgtccaacatgcgtcagtttgtcaagtacagccgttttaagcaatttgctctgagggtaaattttgtgtgcaactaatcttacatatcttttctcactatatgttcctaatgatgttggtttctttcatgctcaggctttagcaagtacactaaaagaggaagaactagcagatctgaaggaccagttcgatgcaattgatgttgataaaagtggatcaattagtattgaggaaatgcggcatgtaagttcttactggatattcttaatgaaaatgcactttggcacataattgaagtctctgattgtcttttttatgtttcaataggcccttgcaaaggatcttccttggagattgaagggcccccgtgttctcgagattatccaagcagtaagtgtcaggccttctttattattttcccccttattttcggagcaactagcttaccatctatcagagtcgtacttcaactgtgatattattctgtggcagatcgacagcaacactgatggtcttgtggactttgaagagtttgtagcagcaaccctccatatacatcaaatggctgagcttgactctgaaaggtggggcctacgctgccaggctgctttcagcaaatttgatctggatggtgacggatacatcactccagatgaactcagaatggtaagtttcaattcctgttctgtgttcatgttggtttatgtagctacctcatatttagtgaatgaagtgattttgtccacagaagatattatttcttacaccaagaaagaaaatcccagattttcacatatgttagtcgatgctccacatagtaggggcctgtctcatacgtataggaggcctgtttgataaattgaaaagcatttttctttgtgcaacatcgaagaccagtttgttgcagtgtgctatttcagcaattagatgcgagattaattttgactaattaatcctgtataaatgtttggactgtgacagaaacaaaactagtagtatttctcattgaggtttactttcaaggtgcagcacactggcttgaagggttccatcgagccattgctggaggaggccgacatcgacaaagacgggagaataagcttgtcggagttccgcaagctcctgcggacagcgagcatgagcaaccttcccagtccaagaggacctccaaatccacaacccctgtgaacgtcggtaagaaccgagatgagacgtcgtaaattagtcttgtaaaggttgtcttgttcctgtccgcgtgccatgtgatgttgagggtgtcttgagtttttagcatccaggttccgtgtgcagcatgcagataaagtttcggtgtagtacggagtacatacatatttttttcaaaaaaaaatgttacaagcagaaatgctgttctagtctcccattctcctccttgtacataattctatatatgtatgatttgattgcacgtattcatcgcaataaagttgcctgggattgcatgatcatgtgaacttgtgtactagatgtagatggtgatattgcaaggccatctagctagctagcagctgtaatactagttcagagctaagcaactttcaaatctatttgagtatttgtctatgcagtgttgatttgtttgaggttttgagaaactcggtttcccatttgctggaaatgctttttttttttttgctcactaatattcagttcaacctctgttgagtgcactgcaaaatttagccaaaaaagacttccaatttcttcagagaaactgacttcaagtgtgccttagcgtaagttctaaactgcaaacttagccgcacgcaaaacgggataactcactattccataattaattatgcaattattataaattttaaaaatatatcttttattttttaaagaaaactttatatagatttttttcacaaaatataccatttgataattaagaaattgtgctaatgaaaaacgacaaacttctaatttggagctagtataatttaggagccctatcagtatcacagtcaacatttacaaacagaaccctgactagatcaatatttacaatcagcgccctcaatattcactcgtcactccactgcaatatacaatggcgcatgcttgaatgccgccgccgccgccgcgacctcgtttggcgccaaatccggccgccatcatccacgccgcgctgctcaaatcctccccggccagcctcccgccgcgcctctccttcaactccctcctcgccgccgccgctgcctccccgcacccgcgcctccgctccctcgtcctccccgcgctcgcgctcgcgcaccgctgccccgccgccgctgggccgctcgactcctacgccctgtgctccgcgctccgccacgcctccgcgccggaggcggagccactccacgcccacgccgccaggtccggctggctcggcagcgtcttcgtgtcctgcgcgatcgccgcggcctacggtgggtccggcaggttcttggacgcacgcaggctgttcgacgaaagtcctgtcaggaatgccgtctttgggaacgctgttcttgctgggtacgtgaacgcggggaagtgggcaccgttgctggagtttgcaaggaggttttcggagcttcgattgcaggttgatgggtacacgatgacggctgtggtgagagcttgcggagagttggcggatgctgatttgggtggacaggcgcatgggcatgcgatcagaagggtgggagctgtggagtctgacgtgttcttgaccagtgcgcttgtggacatgtatgccaagtgtgggcttgttagccacgcgaagcgcgtgtttgacctcgcccagcaagtgaatgctgttggaatcgatgttgtgctgtggacggcgctgctgaacgcatatggaaggcacggaatgtgcaaagaggttatccagatatatgatcggatggtggcttcaggggtccggcctgatgaactgactattctggctgtgctctcagcatgccaacatgctggggaggtggtcaaagggctccactattttgagtctatacatgaagattacgggttgacaccgacaccagatcatttcagctgcgtggtcaacatgctatgtcgggcagggatggtgatcaaggcctgggagattgtgacctccaaaggctgtggaggtgagtttggcatctccacatgggtggctttgctcagtgcttgctgtgattgtggcaatgttgagctcgggaggatggctgctcagagggcaatcgagctggagcctaacaatggcaccatttatgttgagttgtcaaatttgtatgcgaggtttggcttgtggggggagattgaccagctgcgggaattgatgaaggacaatgggttggaaaaagatgctggattgacatgggttgagcttagttcctgatatgacttaaaatcccttcatgaaaccagtacaggtggaggaaggggaggcaatttcgcttttgttatgaaagccaactgagtatttttgggaacagatttgagtatagtcctattttttggtcacatatttaagactgctggaggaattgaaagtgaaaccactcgtggctttgccttggtcacctcatatttatcttcgttcaacaatgcatatacacctttacatcaggactggatccgactttagcatggttgctgcctcatgatgcctccaatgaattgaaagcatctgtgtaccagcgggttacaaaccgccagaataatccaaagatattaacattcagtcatgtactcttctgatgcgaacatgatgccctagtgtgacaagtgataactgtgctgagatgaaccaaacgaattgaaagtattcgatgtgccagaagttctcttatgaatcaaaatatttgtaaagaaaaaaggctcctccttctgactctttcaccaagacaaacttgtgctatggatttgatttgcaggtttctcctagacaaaattacaccgggtgctcgaaatctggaacttattagacttctcatggtacgaatgctttctttttattcttcaatggagttcttcctatatgttgtgactgttatttttgaaatgacactgaaatttcacaggtcaggcctttgttattgtgatcatgatctgctaaatcactgctagttgtcgttccaacaaagaagaattaaatatgcagtacaatcgcgcttgatgtcctagacaagaccagttaaaatacatcagattaggcagtgctgaaagggctattattttctatatattgatacagtcaatttgagtagtatgagaaactaactcaatgtatccagtttatagtgcaggtcttagtaatgggttattttatttggaacattaactaataatatccaaaagacataaaaaaagaactagcagtaggaatctctctcttagtagctaaagcatgattattcaattcgtcttatgcaagcaaaagtgtatgcatatgcaaaagcatgcctatcgccaccttttgccttgatttctccttattgctaaaagtgatcacagagccactacaaaattgaagtaccataacttgtagctctgaattcctaataccactcgttgcgacttaacaggtttttggaaaatgttatggccagattttgactaacctggaaaagaggttgtgcataaaattcaatagaagataaaatgaaagcttgatcctcattacaaaaacccaaccagagaccgagttggtaactttcccctcaaatgattcctgcctctccaatgccaggccaactctagcttcaaatccaggggaggaatcaaagaggaagggcagaaaaggcattagtaacataaaagtaaaggaaggaatgcattccaagcttgcattccttttcttctcctgaactatataaacacactggttcccacaaatcttgtaagcaaacagtctgttttgccctctttgctggaacaatcatgggtcttgcatttagtgccttcggtaagtttggtaaatactttcagttcgttctttgtttttatctcttgagatagacaagtgccacatgtatgttgaaccgatctgtgcacagctgttttatctccttcaggaaggcctcattgattggaatgtgtgatattgctaacattatgcaattctggagcttttatttccctttcatgttctgaattgttagtttgctgttgttcttttcaggcctgccagggtggagcagtataccaaccggacaagtttatgatcagtatttcaaggacaagaaaaccgacagctttgaagcttttcatgttgcctatgttgagttctgcaagtaagcaccctcattcttaaatttctattgtctgcgcaatcttgttcgttgtcggttgttatctatctcatcttcccaaattactgcagagatttcaacaccgtgctacctggtcaagattttgataccccatcactcgaaaaaattcaggtaaccctatctttcaaatcttcttcctccttgaggatgtagttttgcgcaaacattcccaataagcgacacctcactgtgaattaattggcctagattacagaaatgcagtccaaaaaaagacaaattaaactggggatatagttttgcacaaacatttcccgataagcgacacctcgctctgaataaattggcctagattaacagaaatttagtcaaaaaaaaattgaactacgtaacggtgcatgacttatgacttgcagaaattctatgatgatacttggaaactgatcaacgaagaccaagaaaagaagaaagcgttcatggattacatccgcgacaacgtcaaggaggcggcggtcgacgacagcctcttcatcatggccgggctggcggcgccggcgggagccatcgtcctcaagaggacagggcagagcatcccgcagctgaagaggctggacctcctccccaacgtcctcttcgtcccgctcttcactctcgctgccatcatgggagcaactgcagtccagatgaagcagaggagcagacacacctgatctcctcatcataatcatctacattgcgtcggcagttataatttacaaataataacatggatgaatgtcgatcaaatctgcactgcaatgtcagcgtcaaatatatacacacgttttcttttgtaatcttctttattgttactgtccatactgataataatatcacacaccgggatacgcctttgccaagctgccatcatctgagtgttgtatacatggtgaattattattattttatttctgttcatcatatttccgaaatgaaccttatgctaacttggtaagcctggagtcgcagtataagtccggcatggaatcaaaggttgtcgctcgagcaaacttccacatcaataaatttaaaaaagaaagaacccatcaaagcgtatcctgcaagatcaatcaatgtctgtctggtttgcgaacttgctcaaactttccactgatttggaacgtttctttagaagcatcccacaaattcacacatgtgcatgacaatgaggaataaatcatcagtcccccaaaagaggaatatttggccaacatgtgcatgacaatgaaagggtaaagtcacagaacagcggcagaacattgataccttgctcaactatagagcaaaaccagacctgatatagtaaccaaactcatgtcctggttaaacacttgctttcacagaactcatcatctctcgctgatactgtatattacaatcgatttagatgaacaaacaaaaaaagactactacaggctcaaattctaacttcatagaaggttgggatagataggttatcagtaattcttgcaatggagggcacggcgagctgttatcactttcccctgaaaagcaaacaggaaggacagatagataagtgtaagctgaggagctaaaactaagagaatttttttatggaacttgttttgcttttcacttacgtgttcatcattaatgtaatgttgtctccttttaagagaatccggcctgagacaaatcaaagtaagttacgaagatttcatatatgttgtgaacaaagaacaatagtagcagagtgcagaatttccttacccagagattttctagtgtccttctttatgttgatctcctcagcttcatccaagaccaaattcatgtattcgtcaaagccctacaaaacttgctgcagtaattatattgttcaacagtattcagtgaggataaaccagcaacatacgaaaaactaccttagcatgcacgtgcaaggtcacagacacaacaattatagttgtaaagaatagcaactcacgggtgagaagaattaaatcctcaaaagttttgtcatctgtcctatcccatgagatattgtgaataaatacaacatacagtacagagttgacatacatctagacagaaaagttatattatgtatataatatctagtataacagtatcaagcattaaaatggtcaactggcagtattttcttgtcaaatcgagttgtcagatcagcaaagtttcgcactgaaagcattagggttacatgtgaacacataaaaaaatagcagttctatgtgcccatcgcataaacaaacactcaataataaagctacttctgttttcgctgatacattatactatattggagtcaggcaatctcgtgaaataggaatttatgcaaatacagtacagattcttgaaagtgtctagcagctgtcactagtctgtcgctattactacaaaactaaagaaataaatgcctaacttcgctatctccaatgcaaaacgacaataacttacagatctataaacctgctcttcttccaaaaaagaaatacacacactcgtaaaaccacacagatcctacccaagacatgtccaagactacaaacaataaatcaaaaaaagagacgctattgctaggtctggatttcatgtttaaaagctacttcagacgcatatgggaatacaatacaacaaaagtgtatgacagtatgagcatttgagcaacaacctcaatcctgacggcagtattatctaacatctcaaatttcacctctagcaaacctcaatcctgacggcaatattatcttaacatctcaaatttcacctctagcaaaccactcttacaaaggcccctcatcttcttagggcaaaattctttctagcatacaagattaaactttctccccaataatatttccatagctaagggggattagggaacttacgatgattctgccctcaatccggaggtccttctgctcgaagagccagatctggatgcgcgctttctgctcagaggaaagaagacgaaacgagaaatcaagaaaagcacacaagcagcacggacacaggaagaggagaaagaactgcgagggggggtaaggcgcgtacactctggaggaagcggaagatgaggttgatgggctgggtcataatcctctgcaccttggtggacgccatggcggcggagttcgcttctcctcgacctcgcgcgctctccttcctgccctcggcgagctgacgcctaaaaaccctagtttgtttgcgagaggggcttttgcagcagctgggtgtggttcgctatggagaagccaagcttttatcaagagtacacatgagtttcatgtaaccatgtaattttccatttcaaattatattttttaagacttacacccttcatctaaaaaaacttaatctaaataaaataggacatatatcctacaacaataaataactcttatctaaatttgttaattagatcatattttaggttgggttttttctatgaagtaagtagaaaatattttacttcccgcgtcctaactaagatacaagaatttggttagttaaactactttaaatttaataaaagttttatggagaaaagtattaatatctaccatctaaaaagtaaactataaaaatatattttataatgcatctagtgatacttatttgataccgtaaaaaaattattctccattactatggatttagttgaacttagaatagtttaatatgagataaactaaaaatcccttatatttacatgagaaaaaagtttttaaatttagaggagtactatatcgcaaagagtatctttaccaatgatgaggttttttttaatgcttttaaattataaatcgtattgttagataaatgtagcaaaatcataagttgattttatcgttgaccccaaactcctaaagtgtcatagtcaaacaaccgatcttaatatgtattacgtatgtgtttggaattcaaacagacagtcatgaaacaaccagaagggtataagtgggaggtgagcgtgtttatatcttccgtgcaaattcagaaataaaatcattaattgttttttaaaaaaaagtataaacattctcttataggagaacgtgtaactagattttgctatatctagcatatactgttttgaaataaataccgaaatgtgcaggtgttgcaaaagaaaaattcagtttggcaaaacatcagtagtcaaatgatattccctaataagtcgtttaagtttattagaaaataaaaattaatttataagtaaaacttttatatatttattattcatagcgacttaaaaactaatattaaaaagttacattaaaaatatattaaaatcaactttaaaattaagatcaaaaatttaaattttagcttttgctttgcagaaatatccccaaatgccccatgttccatctgagccgtccaaccccacgatcggacggtccttacgcctccgcagaatctcacctccgtatcagttagtatgcccaattctcctcttctccccactctcctctcgcatctcttcttcttcttttcttctccagatcgcgaggcgggcggaatcgcggaagcagggggatcccgcagccgaatcgggccggatctcgccggcgatgatgccgtcggcgtcggacgccgcggcggcggcggcggcgctggagctgcaggagtccgggtgggaggagctgcggcgggaggcacggaagctggagggtgacctcgacgtcaagctctcctcctacgcgcgcctcgccgcgcgctcctcctccgccgccgacgccgcctccgcctcctccccgagcgagcgctcctcctggaagtccatggagttcgagatccagtcgctgctcgacaagctgcaggacgtcaacgacgccatgagccgctgcgccgcctccaccgcccccaccacctccgtctcgcagaagctcgcccgccaccgcgacatcctccacgagttcgcgcaggtaaaccctagcccctgcccgcccccccgccccccccccccaactccctcacctctcctccccctcacactgcttgtaactgatcgccacaggagttcaggaggacgagggggaatctgagctccatcagggagcacgccgatctcctcagctctgtgcgggacgacattactgagtccaaggttcttgcctcaaacccctctacaaaatggtttaactgattaactccacaaaatggttgtaatgtaatgtgctatcgtgttgtgctggcctgattgatcgttgtggttgtctaggctactggcggcatgtcgccgagggtgcatttgctcagggagagggcctcgattcatggcagcattaaccaggtatggcttgagctaaaataaggttgttgttgcacacttgcactgatcaaatggtttcctggttggcatagtcgcatagatgttcattggctagaagaatttatgtctataggcatgccatgttcatcattagttggactggacttatgttatctcatgatcatgacaatctgcctgtcaatggcgtttgatgtagtgtaaagtttggaggagggtctatctaatctctctcattgctagttcatctttcaaccatttgattagttatgaaaaaacaactagaataattgaggtagtctgagtggaaaaaggaaggaaatcgtggtatttctgtcttcagcattacgagtatgcatttctgaggatttttggtttatctagcacaacaatgtaaaaaaggtagctcatcctgtacaatatattaagtaacagctatgacttgtttccagattgatgaggtaattggccaagctcagagcacaagggtagccctttccaatcagagggcattgtttggggatgttcaaggaaaagtcaagcagttgggtgaaaagttccctgttattagaggactacttggtaatgtatcaatccccaatttacatttttattgatcctttcttacatattgttctgaactggcattgtgctaaatgtgctaatctattattcaccgaaatttctgcatcccaactttccatgatcatgtttgttttagtttgtgttagtagttagtacaccactacctttcttacacattcttgctacaggtgccatcaagaggaagaaatcaaaggacactatcatcctttcagcagtgatcgcggcctgcaccatctttttgattatttactggctttcgaaatgatggttgtctccagaaaatctcaccgtgaaggcttcccctctgcgcagaatcgctgataccagatgacacgataagacttggtagtatgtttcatttgttaggctaagaggaggaatgagagatcggattcttcagcttttatcaatttgcctttgatatatactcctaccttgtatttggagattaacctgtcctacatgtacagtacagagcaattttgctttccaaagtaacttgtctggctggctgagtaaatatgatacaatcaagctgatgctctttttgtgataaaaaaaatggccattaaaacacttgatccgttgagcacttaggtttagctggaaaatagtctctcgtctcttctcaacgaccgagtggctggctgctattaatctcagttatatgttcagctttacacatttacagctgatcagaagtgaagattattgacgcatctaccttcactttgatgctaacaaccttagatagtacgatggcaaccagtatgctacgtgtgctggtaagctttggagttcaacaagttttcacttcaaaataaaactaggaatctagaaccatagcgtgcagtagtgcattctcaaatatcacattcatcatcttgcagcgctcaatggattttttttttacctctatggacaatcttccatccaattgcatgcatgaacattagataaaagaggtatcagatagtgacacttgacaatgcatgcaatcgtgcattctcaaatatcacattcaccatcttgcagcactcaatggaattttcgatctttatggacaatgttaagtaacaatctcattgcgctccatccaattgcatgcatgatccatggacattcgataaaaaggggtatcagatagttgacactttacaatgcaaggcatgaagcatgaaaaaatggtgaccaagtacagtttcatcccaaaaggccttctttccccagaagccgcccaaatacaattaaacaatttttgtaatgaatcagttgtgtttcctttttactctgtaagaacaaactatttacaccagaagtgacatatttgtaacaggttgcctatggcaaggaaaaaacagctcaatcctgacaaagttaacagccgcattctatggttctatctcacttcaaagtcagatatcatactctcttcgcaagagccacgtttttgcagtgatgacaactggtattcgacatctcagcaggacttgccgacttggctcaatcatacatttggcgaacatactgctgaaggcagaagtacatgaacagggcactcctagctgcatcagactccaaagagaggtaaagctactttgatgaatgagtaacaaagtgcccctgtgaaaacatagctgtctactcggtcaagcatcccacctgcattgcagccttgtgttatgttcatgcagaagctatagatgattctttaaatacaaaccatgaaatctggaaatataatttatttctccttcagggatgaaagcaaagttaacagattaacatacacagtaaaactttcaatatgagtttgacattatctataaagcaggcaaagtgcgttaaaaatagaagttcctgttgtcagatctcagtaagttgaggcaatatctatctcttagttgacaaagaagggttgtacaaaaagtaaaaaactataagaaattataattacatggattaatgcagttgacaacttgagatgacactatgaaattatgcatccaataaggcctttaacatttatcctaaatctcaagacaatcaattgcacatgtagatgcattactacaattgaataaggcagtgagttaaaaaaggttaccatggccaggaatgagtgatccagagtccttcacaccagcatcacgcttgatcagagactcgacaagatccccgaacaacgaacccagaaagatcaagattccgtaagcagtagcactgatatcagtgaaatagttagttatcaaaaccaagtgttaaggaaatatttgctacttgtgaacatgcaagtgaacaacctatcaaagttttgaacacaatcagactaacactcgatgctcacatgtagttcatttccataaagaactcctagcagcagctgtttgttgttcatatgttaagcaaaatataatgcgcattatggtactgctgatacaccctaaaaggtgaaagcctacattgaccagtaaatggcattcggaaaaaccagtatgcaagaagtttcagtggagagatgtgatgtttgctacagaaaattgtaataatagttagaagccagaaattagcaacacctcagcagcgatcttggccaatgtaagacgcttgaaagaagcacagtggtcagtacacagccagttagaccagctaaagcaccctccaaggtcttcttagggcttatatcagtaagaggagtgcgaccaaatgcctgaaatggaaaataaataacatgacgacacgatttccttattcaaagtacaaaacttctttaatatactacttgaatgcaaaaatacagacagtaggaatacttgttcacacaacaaaaggacagcaaaattaagatataatagaaacatgagagtctgctagcagcttgtcagcaggaaaaggaaaaaccttcaagcagtttatatgtgatctaaaatattctagcagcgtggttttctatatcaattatgaaccaactataccactcagcatagtttggatggcttaatagcactgtgattgatgactggaacgcctcaagtcacaaaagtctcaaatatctactgtagtcacacaaaacaagggtaagaattacaagagcacaaggttacaaccgttccttactctaacattaccatgggcattgcaaaagataatatattttttaaaaaaaataatatatcttctttacactaaaataaaaaatgaaatcaaactggacattatagaagaaaagaacatacccgtccacaaaggaaagcagatgtatcagcggcaataatgctactaatagaaatcaaggttgctacaagtccaactgtccagtgagcttgcccaccaagaagtattggccaactgtatgcaatttctggcaaaacacatactgcataagcaagaggaatcctattcgcttgctatagtgaaatttaacagtacaaactcttgaactggtaaaaactttgctgctcaactttttatgaaccttttgaaaaaattaagactaacataaattgaacagaaacatataatttgatggacacaccatttctacatttgctaacaaactagacagaaaaggaattaataaaacgaaggcaccccaactaagaaaggacaaaacaaacttgattgaacaacatacttgtatttaaggcaggagcagctagtccagatcggagcttaacccagaaagaaggaagatagccacaataaaagagaccaaaaactgaactagtcagctgtgcaaaacgaggatttcctctttgcaataacaatgatatcgcaataaggaatgcagaaaacgtcacggtaacatccatatgcccatagtacctaagcaaatagacagatgaaacatcaggttcagaaaattgtcacatttacagaaaatgacaacttaaatatagtcatgtaccaaataatactccctccatttcttttactctagttaggatatcgacacaatctccaatgtgtattaattgcacataagttttttcatgacaaatctactaatgctattttcagttttttttcacatgtcaaaacttgacatgtttcatatattagtgaattaaggtctcaagtttgcctacgtgcattctaaaacttcatctatttgagaacaaactcatgaaggaagtagtacaatacataattccctcagatttttaatctttaacaggtgaatcatcattaagatctattcgcagtcccctcccatattttgttcaaaagtgatgcatgcctcaactgttcaaaaacagatgcctggtggttacttaagttctcatatatacagtctacattgatctttttcagaaacatcaatccacaagataaacagagaagcttaaggactatcctttgcaatattgattctagggcgtttgagcacccaaacagcaagtagtgagatccagtgcatctcttcttgttgacaaacctcaacagtcaacaatgcctttactttatgatgatggccagtattcatccccaatttccatcagatagctgattgacacccagaccgaaacctcactatttgattagactctccctgtcttctattcattcaatagagacagacaccattcagttcagtttcaactcttatattagtcagaacaggtttccctttacaaaattaaagatcctaagcaatttcatgtaccactatccttgttacatacaggattactggctaaaagttactttcactaagaatgacaccttgaaacaacaaatcctgactaaactacacatgaattgaacaccaattgattgaagcaaatggttagctaacacagttcatccaaattaaccaatgtaggtgtaaccgcgaggcctgcttacagggtaaggataggcatgagagcgcagatggcagagcagacgcgggacacgaagcgcggcggcggcgtgcctcccccgccggcggtcccgcggacgagcccgaagtactcacgagctccggcgaggacagccgcggccacggcggccgcgaacacccacccgccggccaccacgacgccgcccgcgcccaccccgatggcgacgcccacgagcacacgcttctgaagctgccgcgacttctccctcttcctctccgcctcctccccgccgccgcccccgccgccgcctccatcggcggagacagcggcggccgcgaggagcggggagcggcggaggaggcggcggagagggggtggtgtcgggatgaggaggcggaggcggagggtggggcggggacgtggctgggaggggaggagggggaggcggtggtggcggtggtggtggtggaggtgggcggcggccggcgtcgtcgctgtggccaccgcggcggccatgggagatgggggttgcagtgttggtggttgtgtagtggagggaggcggagagttcgatgtcaataggggattttgctggacttgtttgctttgcttggcgcaaaaaaaataaaagaaaagaaagactttcgtgtttaaaacgtgcttaaaaaaaaactactccctccgttttacaatataacttattctagcatttttcacatccatattgatgttaatgaatctagatgtgaaaagtactagaatgatttatattgtgaaacggagaaagcacatgcacaaagtactgtaaattggagcatgtgtattcataaaggcaacaaagtttgcaagttagaaataccttttcacccaatgatgagaaatcatttgacgcaagaataccttttagttgcaggaataaaaaaaacggaggaataaaaaaaacatgattctgataggaatgcaaatataaaacatatgattataaaatgcaaaaattaccgtttgattcgaccgtataaattagacgagagagatagactcaaataaaagctctcactaagtttcattcaaaatctttgtatgattgtccattttattggaatttttcttataggattgaaatcctccaaaatttatacaaatcaaagaggccctaaaaatatgaattcaatgacgatgtaaaaaatgtaagaatagaatgtcacgctttatattggtttcaaacacactagaattcaaccgttttgtatatatttacatggttaaaaacctagaaattcttgagaataatcttttgtataatagagataccactatatgtcatatagaaattcttgagaataatcttttgtataatagagataccactatatgtcatatagagaaagcaaagaaaaagtgcatgagaattaaaaaattaaataaaaacgtgaggtgaggttatgaactcatgcttaacagtctcaacggttgcctaaaaaccaaagaaaaaaattttaaaaacttaatttaattaattttaaaattgattttaagatatttttagcatagttttttttagtattggttttaaagtcgctaaggatacatatgttaaagttttaggtccctaataagccattcgacttgtaatcaatttttgggcaaccgatgagcccctaaattcatatagagttgagatgtgctttgtaggaaaggaactccatatattctttttttagcaatgatattcttttgctccaaatagtgcattgaaaccatccaagttttcttttgaaattgctttaatccagagagacctaaatctcttagcttcccaatttagcacaaatccttttaccccaaactcatctatgtatagaacataaagatagttttgatgtgaatattttccgatctattacaattattcgttagtagttatattggatgataaaccagttttacaaacggcttggtatttgtaaagtactctctctgtcttaaattaattcacatgaattatgtaacttgacttattttgaacaaagggaattgaattggtgtggtccatatcatcttgttactatcgattttctcataatttaattctagtaactaaaatgtctctaaagtatttacctcatatcggccttaaaaacataattttcaactttatatgctacgtctccaagtatttactcctccaatttctaattttttgacgttttggacattatctcacataaaaaaattaattaggatgcttattttatgtattttcacattaaatatattagtgcggtggttctaataaacttaacctggtagttatgaccggtagtttcaaagatttaggttggatttaaatcttggcacctactatttttctatgcttttaccgtggcgttggaaacgatacgacaatttgatttttttttccacatgatttttgcgctgctggacaagagtcgatgcacaggttaacgtgatttgcatgcatacatgtatacaagctaaagtgatcacatggagactaaaaaagtagtgatatacatattactgaaccgtacgactacgctgaaccaaccaatcacgaagttcataagtattcacgtgggcccaatcagaataagttaaaacctaagcttatgtccagttgtacacatgtcggacaaacgcagtcgtatgtgcagtcattccgagactaaaacatcaaaagtttttattcaaaaggtccaagccccgaatgtcaactaattcatcactagagggagtattatgtttatgcttttaatttttcactttgtgcattaaaatatttaataatttatatgtgtttatggtactttcaaacgagatatcttatatttttcttgtaactataaattcatcttaaaatataagaggttttggttgatgaaacatattttattctaatactatgaatctgaatatagagcctaaccaaaaattttttatattcgagagcgaagaaagtagatcatactatgatctatactaggaacaacaatacacatatgtgatacgaagagcaaactagaaaaccatggttgcgtttagttcacactaaaattgaaagtttgattaaaattagaacgatgtgacggaaaagttaaaaatttgtgtgtagaaaagtttcgatgtgatgaaaaagttagaagtttaaagaattattttggaactaaaaaccgcgcatgtcacgaacgaagcatgcaaagcagcaaccgaaataacgaatcaaccctgaaaccgcacaaaaacggcaacacaaaacacaaccacaaccacaagcaggtccggtcgagccgagtcgagtcaatctctcttctctcttctctcctctcctctccactctccgatccccacgtatggcggcggcggcggcatctgcggcggcggcgacggccgcggaggacggggcgcggctgctgcggctggaggagcaggcggggcacggcggcggcggcgcgtgggagtacctctgcctcgcccgcaggctccgcgcgcgccgcccggagcccgtcctccgcctcggcctcgccctcctcaacgactcctccgcccgctcccgcctcgcctcagaacgtaacctgccatgtcctccctcccccctcccctcccctctacccgatctctcgcaattccgctcggtgggtagatggatttggtggatagatctcgtgatctgctcctcccgacgccccgatccatctgtggatgcgatgccggggttttggatggccaactttgaaccctattgttagattgcggttgtagtactgtgggatctgtagaattgaggtttttttttagaaaaataataattgtgtgttgcctgaaacccctgctgttttacagttagaattactgcaataggattgcaaggctgcaggatctgattgctcccttcgcgattagttcactagtgaactgagattgctttattttgatgcagagtggacgctgtatgagcaggtggcagtggctgccatggattgccagcgtctcgatgtggcaaaggtgaggttgcgctcgtgttgtactggcagtggcacccttttgagctcagttcctgtttctctgattcaacgcaatttcatttaatcactaaacagttcacgcttttggggcctttagttatccaaatttctgatgaagcgatctctttcatgactttacaggattgtattggagtgctttccaagcagtttcctggcagcatgcgggttggtaagttctttcagagatcagcataatatagttagactagcatcatttgtcaacaaacgtagatcttatattttgcttttggatgcacatccgataagactggaaataaaaattacatatggctgagaaaaactaaatataaaaacaatctggcctagaacttaaaaaaatgccaccaatcctgtgtcataaatttatgtcaagttacaattagggttgacaataggccactctgtcaataacttgaggagaaaatacggaggcaaatggtcagggctattaatctagattattatgagttgcactgaattgcttaaccatagtacaatatgatgctaaaccaatcttacaggaactgatgttgatttctttgaaaagatacacctgtatctagcttactactccatatatcaagatagaacgatgatgtggtaagctggattatagcaatgctatcagactaggcattatttgatctaaagtaggagggcagtgtgcctatcaactgaacatgtcatatcttacatgtttcttaactaatgatctattacctaaatcctggtgcgcacaaataaatgccacatacacctaatatcaaattcccctatacttcatatgagtttgcaacttgatatatgctgagacatgtgatgctgattcttatggatatttttctgcatatggtactaaacactttgccctcaaatgaaggtcgattggaagccctgctgtttgaagcaaagggtgaatggactgatgctgaaagggcctatgcgcttatccttgaaaacaatccgttcgatcaggtataattgatatttctgctgctgatcctggtttatatgctgtgaacctgatgtgcaagatggagtttgatttccttggtatataaagccgttcaaatgcttgggatgataattttacaggggcatattaaatattttccttgtgtgctttcagattgtccacaagagaaaaattgctattgcaaaagcacagggtgacatggcattagctgttgagtatctcaacaagtatttggaactgtaagtatctgcatcaacctgatgcgttaaccatatatgtttacctctaatacagtgactttccctgtgtgttagatttatggcagatcatgatgcttggagagaacttgctgaaacatatgttgccttacaaatgtgagatatttaatcatcgattcattcacatctgttagaatgtgatgatgctaattttgttattcctcttgtatcaggtataaacaagctgccttttgttatgaggagctaatattggcccaaccaaccgttccactttatcatctagcttatgccgaggtaagtgaactatgccaaactcatccctcattctctcaaagtctcaaagaaaaataaaacaaaataaaattgtatcaacttatgcagtttctcattttcatgtggagtgcagcagtaatagtttgttttgttcctcaatgaactaatggccaactggccaagtcttacagtggcaatgaacatcaaaaggctaattaaaattaagcacagtaaagttattgctcatcctattgaaaacagtgttgcttgattcaatagaattccatacagagcgatatacttatttgcacattttacggacgttgtgtttggcaatgtaaatggtgtttttgagaaatgaattcaaagtttatcttagaatttgcccccccccctctgtgctgtttttataccagttctgttgttatgttgtaaagtgatgatgggaagaatttgttggagcttgatcttatggggtcttctgggattttggtggggaaaattttctcccttgttttagtagttgttgtgtatgccatatgcacgttacttaatctatacagtaggtgcaagagaatttaccgcatttaccgctgcttttttctgatttatacataataacttatttaacatgcttttctgatttggagatgctactactgttgctttttttttttgttgaatgcaaaatcaccacaaatttagtgttctatacatgcaactaattcaagcctagaacctgtctgcaactcatgattctgctggaaactcaattgatctcatcctacacctctctgtacttctcaaattctcatgaactgtgtgtaatcctttatattttctaggttctgtatacaatgggtggtttggaaaaccttcaaacagctagaaaatattatgcatctacaatacagttgactggaggcaagaatacaagagccctctttggcgtgtgtttggtaagacatcagtgctgttccacaacttctaagaatctcagttggcttccttttgttatccaatactaatcctcttatgtataccaccttcaacatcaacagtgtagctcggcaatcaatcagttgaccaaagggaggaataaggaagaggaaagctcagaactgcagagcttggcttcagaggcactattgaaggattacaagcaacgagcaccgtcgaaggaggcactcatcaccagcctgttgaagaacatgaaactctcctgatcttgccctccactcatcgaaggttttttagcttgtggcacaatcgcagctagtcagtggcgccacaatggcagtttgacaaatcaattgatagcagtataatgcttgttttttttttctcctgatggcaccgaaattgtaaaacttatgtaagatgcttcaatgggttgtaccacacctgttttgatcatttagaaatatatattcatcgtcgtgttttgattgcaaactgtactaagaccatccgttgtaatttcaggatagaaaattttgaataataccttcgaaagctgtaccatttgttaacttgccagacctcatgctgttccttcaagactgtcataaacagaaaagacataaattactttaaatctaagctccacacttcatgtgccaattattcatggtttctcaaattacagagtacttagtagtaaataaatagtactactaatcactatgtttttgtaatattggttgtctattttattttctgcggagggagtaatgtttttccatttcatttcaccagtttttaggcctagttagatttagattatagcgtggattgtctgctttattatagtgataaattaaaattttaagaaataaatttaacaaatagtttaaaggtatctgactcagttacaatgataaattcaaaattttaagaaataaatttaacaaatagctttcaagaagtggtttggagctgaacaatgccgcgcgtaagaaagtttaaaagaaacgatatttttaaaagttcagagcgaatagtctgataaatataagcttaaaaagagccagaccttagcgattaaaatgacactagtttcgttgagcgaaaatgcaccaagaaagtaaagggagcatgcatgcgcgcgacaggcgctaccaccgcacgtcacccgcgaagctctcatggcctcacacaccgcgccattgccatcgtttcaccctacatataaaccgcatccacgacgccaacgatcgctcgaattgatctttcttgctcgcgatcgattcgatcgtcgtcgacgcttcgattaattctcgctcgcagagaccaccaccagtagcagcatccagctgattaaattaagctcgcggcaatggcgcaggtgagcaggacggtcgtggcggcgctgctcctcgtcgccgccgtggtggcggcgtcgcccgtggcgtcggcggccacgtacggctgcttcgaagactgctacgagcgctgcgcctccgggaagaaggacgaggcctgcaccaaaatgtgcaaggaggcttgcggcggcgccgccacggacggccatgcccccgccgctggcgctggtgctggcgccggcgctggcgccgccgtcggggctggcgctaaggctgccatcggggttggcgccggagctggcgctggcgctggcgccggcgtcggagctggcgctaaggccgccatcggggctggcaccggagctggcgctggcgctggtgctggcgccggcgtcggggctggcgctaaggccgccatcggggctggcgctggagttggcgctggcgctggcgctggtgctggtgccgccgtcggggctggcgctaaggccgccatcggggctggcgccggagctggcgctggcgttggcgccgccatcggggctggcgctaaggccgccatcggggctggcgccggagctggcgccggcgtcggggctggcgctaaggccgccatcggggttggcgctggcgttggtgctggcgccgccgtcggggctggcgttggagccgccgccaaagtcgccggcgccgccgagggcgccgccggcgcggcacccaaggtgtacgcgtgagatcgatcgatcgagcggcgtccatctccactactccatccatatataaactcgctgtcgattgtttgttgttaataaaagtttggttaatttaaacgtcaagcgtttagttgtttaatttacatgcaaatctcgcgatttgtgataattaactaccgaaatgtgtgtttgggctgctaattcatccttctcgctccatattaatttgtccatgttacatgtgtgtaaatgttataaagatctaactcatgggcggactatatatatatatatatatatacctacgcgtttcaccttggttaaaagcaaacggttcggtgatccaacaaatccaatatagaagaggcccaaatacaaagtggatcaaagagcagcatttgcattggcagaaattaatttatcaagagatgtaattaatattgctattattctctttaagcaaagaaccagacatgaaattaagatagatatctattagctgtaaatttatatataaaaatacaatcacttccaacactgtttagattactacttgtcgtattaataaacttccatcagaatttattcctattttacctccacccactctctcacccccccaacactccaactattatcatttaataacggttcggctataattatggcgacagatttttcccacaaacacagtcgaattttttcagccttagaattggcatgaagattcgagctcacggggcatcagcacacacacgctttgctgtgattgattctgacacgccatagatgcactgatatgctttttaaactttgttgttgttgtaaattatatatttatacagatttacaaggtagttacacctcacttacacaccacttatatgtaattttagaatttacatatgtaattttaagacttacatatgtaattttgggatttacattgtaaatacactaaaattacatatgtaatttagtgacttacaatgtacatacatgccgactattttttggtgaaaaatatggcgccataaatatagctagtccctttaataaagagcaccaaaatatttttaaaattttaatctctgttaaataatctagaaatattgatattttagaatagataaagtattaaaactttgactatatctatatatctctatggagaagacataatttcagtaacaaatctactcatgatatagtacaataaaatcaattaccttgtgcaattgggtaaacagggtaataatggcctcattaattattctttgtaaatatataagataacatgtgacattcatataagaatcatgcactatacaatatataattgcattcgcacccgaggggcttggcaccctttaaggagtattcatgcatgtcgcaaaatgtaatttctagctgaattaagcttcaatgctaaatgacaaattaggttctatgaaatataggagcacactatttttctttacgaaacacagtgcaaacgcaaaacacttatatttacgtgcgcatgctcgcacgtatgaatacttactagagaccaaattggcatgaattaagattgatcaaattgtcacaaacgtcacgctatgaaaatcgataccatttttacaacacacagacaatgacacaattgacaacacactactatataaacatacatattttttttataaaagggtttcttttttttttttgaaaaagaagagctagagcatataattggatgtacacaatccacccacacatgcactctttctttgaaaaagaaagcacacacccacaagttactagctagctatatttgcagcgtcatattcttaaaaaaaacagttagaacatttttacgctgtaaactaccagtacttatattaaaagtttgcaaacttacacttaattacactgtgaattttaatagatgtactgcaatacacaaataacatattatagagaattagaattaaaagtaatcgattaactacatatgtaagagaatggaagagaagataggagagatagacatatattaacaactatagatgaatacctcattgcgttgctgcgggaaattaagttacataatatatacaaatatgatgcaatatgattattaaaactgaaacaaattaatacttataaattttgagcctataaataattgagattgatggtgttacgagagaagaaagaagggacaattcgaaccatagatctatcatacaaaggctagaaataattagggtgatgtgacttaattaacgagaaaagagagaaacagaaatagtggggatgaactatataagtatataggattgatagaagaaaataaatgatgaagaccaagtgaaaaatcaatgcgaagccctatttttagcaaaattagaccgtgtacatcttttggatgtagaggccggtttaatccattttctaaaacaaatttttagcaaaaacatctcgtagcctcacgctttgcccgggaacctctcgtagcctcacatctcgtcattctccctcctcctttctcacgtatataaacacaccctcacctcctggtgatagatcatctcttgcatcaatcttaatttaatttctctcttcatcatcatctcgctctcgatctcctacagaagctacaatagccagcaaatcaatcgatcgatcgatacgtgcaatggcggccatgaaggtgaacaagattgccgtggcggcgctgttcctcgtcgccgtggtggtggcgggcggcgccggcgctagcgcccacgtcggggttggggctggggccggggccgacgccggcgtcggtgccgccgtcggggccggcgctgacgccgccctcggggttggcgccaacgccgccggcgccgccggggctggagttggggctggaattggagccgccgccaacgtcgccgggtctctcaccggcgccgccgagggcgccgccggcgtggcacccaaggtgcatgtgtgagatcgatcgatcgatcgagcggcgcggcgtacatctccacgactccatccgcccgtagcggcgccggccatcgatccacgaccattcgccgtcgattgtttttgttgttaataattaaagtttggttaatttaaccgccaagtgtttggttgtttattttatactctatccgtactaataaagaaagtcgtttaggataatgtttaagtcaaatcttggaaatataaataatgaacaactctcaaattattgagtttgaaaatgtaaaaattacatgaatagatttgtcttgaaaaatactttcataaaaatatacatatatcactttttaataaatatttttatagaaataagatatcaaagttatgttttgaagactgtgtcgctgtccaaaacaactttctttatgagtatggagggagtatatgcaaacctcgcgatttgtgataattaattaactaccgaaatgtgtgtgcggcctggggcgttgctaattcatccttcgctcggtcgctccattaatttgtaatataaatatatatccatgtattttgtgtaaatgttataaagatctaacttatgggcggatcatcatatatactgacgtgtaaacgttgcttaaaattttgattgttttgttacaaaatctaactcatcactcatgcatggaccatgcatacctacacgtttcatcttggttaaaagtaaacggttttatgatccaacaaatccaatataaaagaggcccaaatacaaagtggataaaagaacatcatttgcattggctgaaattatttctagtctagagatgtagtaattaatatagctattattctctttaagctaagaaccaggcatgcttaaacttttgaaacaaattgagatagatagctattagcagtaaatttatatatcaaaatacaatcaaatcaattccacctctattcagattactatttgttgtatcaatgaacttccattcaaatttcttcttattttacctccactcaccctctcatccccaacgccccaaatatcatcatttaatacagaacaccaaaataatttttaaaattttaatccctgttaaataatctagaaatgttgatattttagaatgaataaatttcacaaaactacagatactttagtcaaattatcataaaacaacatatctaaggtgatgtattacaaaactacagatttaacactaaaattctcaaagaactacatatttaaggtggagtatcgcaaaactacagattaagtaacaaaattatcccaaaactacaggtttagtatcaattcaatcataaaacttagatatttataactcaaatataagactagtgttaaggatttaaactccaaaatctgtagttttgtcataactttgttactaaatccatagttttgcgatactccactttaaatatgtagttttgtaataaatttattgttaaatttgtagttttatgatatatcaccttaaatctatagttttgtgataatttggctagagtatatgcagttttgtgaaatttactcttttagaatagatagagtgttgtactttgactatatctatatatctatacggagaagacataattttcaataacaaatctactcatgatatacgataaaatcaattaccttgtgcaattaggtaaacagggtaataatagcctcattaattattctttgtaaatgtataagataaccagtgacattcatacaagaatcttgcactatacaatatataattgcattcgcacctgaggggcttggcaccctcgtaaggagcaatcatgcatgtcgccaaatgtaatttctagccaaattaagcctcaaagctcaatgacaaattaaggttctatgaagtatagaagcacattatttttctttacgaaacacagtccagacgcaaaacacttatatttatgtgcctacgctcacacgtatgaatgaatatataccttaccctataaatacttcctagagactaaattgacatgaattgagattgatgaagttggcatggacatctcgctatgaaaatcgataccatttgtacaacacacagacaatgagactattgccaatactcaacgctactatataaacatacataatttttttatcaaaaggatttttttttaaaagaaaagtgtcgatgttttaggtcacgactacggtatttgcatggtatggagatcgttggtaccagggtatatgcaagattgaagtaaaagagacagaaacaaggatttttacgcaaattcgggcccccttcacaggaagctaatgaccctactcccgttaaccgaagccagtgttgctttttattcggctgaatcacacaagtacaataattgcgataacctatctagctgtcttcgacttggcgacatggatcaccaacacgtagtcgacgacagggtagtcttcctcctcgtgtacgaactcgtcgaaatcagagatggcgctagatccctcttgtcggtctccacaagcaccagattgggtttgtctaggttaatctctaatgccgatgtctggcttgttttggcttgtgtgttgatttgttgtgtgtgttctctcccctaggggattttgtatttatacaataaatgtcccattgtccaagtagaactagggagaccaaaatggaaaaaatcctaatagtccttatagtttttatatagaactctatttgtcattccttatccggaattccttctatatacgaggtatgattccttataagatttggtatatggtgagccccgccgagtttagtcaattactactaggtatgtgctattcataaccatgataaaaaagagctagagcatataattggatgtacacacaatccacccacacatgcactatttcttaaaaaaaaagcacgaacccacaagttagtagctatgttcatagcgtcatatttaaaaaaacagttagaccatttttacgctgtaaattactcgtacttatatattaataaaagtttgcaaacttactagatatactgcaatgtttgtaatacacaattaacacattagaattagaattaaaagtaattgattaactacatatgaaaagaagataggagaggtagacatatattaaaatagaagaaaattaaataactgatgaaaaccaagtgaaaaattaatgcgaaaccctatttttagcaaaaacaaattaaacctattcacgcttgtccgggaacctctcgtagcctgacatgatcacatctctcgtcattcccccctcctcctttctcacgtatataaacaccccctcccctccggttgatcgatcatctcttgcatcgatcttaatttctctcttcatcttctcgctctcgatctcctacagaagctatagtagccagcaaatcaatcgatcgatccgtacaatggcggccatgaagatgaacaagattgccgtggcggcgctgttcctcgtcgccgtggtggtggcgggcggcgccggcgctagcgcccacgtcggggttggggttggggctggggccggcgccgacgccgccctcggggttggcgccaacgccgccggcgccgccggggctggagttggggctggaattggagccgccgccaacgtcgccgggtctctcaccggcgccgccggcgtggcacccaaggtgcatgtgtgagatcgatcgatccatcgatcgatcgagcgcgcggcggcgtcatctccactactccatccgcccgtagcagcgccggccatcgatccacgaccattcgccgtccattgtttttgttgttaataatcaaagtttggttaatttaaccgtcaagtgtttggttgtttattttatactccatccgtactgataaaaaaatcatttagaagaatgtttaattcaaaccttaggaatataaatcatgaataactctcaagttgttgagtttgaaaatgtaaaaattatatgaataaatttgtcttgaaaaatacttttataaaagcatgcatatatcactttttaataaataattttatagaaataagatatcaaagttatgttttaaagaccgtgtcgctgtccaaaacgacttcctttacgagtatggaaacctcgccgatttgtgataattaattaactaccgaaatgtgtgtgcggcctggggcgttgctaattcatccttcgctcggtcgctccattaatttgtaatataaatatatatccatatattttgtgtaaatgttataaagatctaacttatcggcggatcatcatatatactggcatgtaaacgttgcttaaaattttgactgttttgttacaaaatcaaactcatcactcatgcatggaccatgcatacctactcgttttatcttggttaaaagtaaacggtttgatgatccaacaaatcatagaagaggcccaaatacaaagtggataaaagagcatcatttgcattggctgaaattatttttaatctagagatgtagtaattaaggaactagctagcaaattcgagtaattaatatagctattattctctttaagctaattaagaaccaggcatgcttaaacttttgaaacaaatttatatatcaaaatacaatcaattccacctctattcagattactacttgtcgcatcaatgaacttccattcaaatttcttcttattttacctccactcaccctctcatccccaacaccccaactatcatcatttaatacagaacaccaaaatattttttaaattttaatccctgttaaataatctagaaatgttgatattttagaatgagtaaatttcacaaaactacagatactttggtcaaattatcacaaaactgttgatttaaagtgatgtattacaaaactacatatttaacactaaaattttcaaagaactatatatttaaggtggagtatcgtaaaactacagattaagtaacaaaattatcccaaaactacatgtttagtataaattcaatcataaaacttagacatttataactcaaatataacacaagtgctaaggatttaaactccaaaatctgtagttttgtcataactctgttactaaatctataattttccgatactccactttaaatatgtagttttgtgataaatttattattaaatttgtagttttgtgatacatcaccttaaatttgtagttttgtgataatttggctagagtatttgtagttttgtggtatttactcttttagaataaatggagtgttgtactttgactatatctatatatctatatggagaagacataattttcaataacaaatctactcatgatatataataaaatcaattaccttgtgcaattgggtaaacaaggtaataatgacctcattaattattctttgtaaatgtataagataaccagtgacattcatacaagaatcatgcactgtacaatatataattgcattcgtacggaggggcttggcacccttgtaaggagcaatcatgcatgtcgccaaatgtaatttctagccaaattaaggttcaaagcttgatgacaaattaaggttctatgaagtatagaagcacattatttttctttatgaaacacagcgcagatgcaaaacacttatatttacgtgtgtacgctcacacgtatgaatagatatgtaccttaccctatgaatacttcctagagaccaaattgacataaattgagattgatgaagttggaacagatgtctcgctatgaaaatcgataccatttgtacaacacacagacaatgagactattgtcaacactcaacactactatataaacatacataattttttaatcaaaaggttttttttttgaaaagaaaagtgttgacgttttaggtcacgactacggtatttgcatggtatgaagatcgacggtactaggatatatgcgagattgaagtaaaagaaattagacaatgatttttatacaaattcgggccccttcacatgaaggtaatgaccctactcccgttttccgaagccgatgttgctctttattcgtctgaatcacacaagtacaacaattgggataacctatctagctgtcgtcgatttggcgacatggatcaccaacacgtagtcgatgacagggtagtcttcctcctcgagtacgaacgcgtcgagatcatagatggtactagatcccctcttgtcggcctccacaggcactagattggatttgcctaggctaatctctaatgtcgatgtctggcttgtctttgcttgtgtgttgatttgttgtgtcttctctccccctagggggatttgtatttataccaatagatatcccattgtccaagtagaattagggagaccaaaatagatacaatctgaatagtacttatagtttctataaagaactctatttgttcttccttatccggaactctttttatatacgagatatgattccgtataagacttggtatatggtaagccccgtcgagcttagtcaattactattgggtatgtggtatccataaacatgacaaaaaaagagctagagcatataattggatgtacacaatccacccacacatgctctttcttaaaaaaaagtgcaaaccacaagttagtagctatattcgtaacgccatatttaaaaaaacagttagtccatttttatgctgtaaattactcgtacttatttattattaaaagtttgcagacttacacttaattacactgcgaattttactagatatatactagcaattgattaactacatatggaagagaagataagagagatagacatatattaacaattagatagaagaaaattaattaactgatgaaaaccaagtgaaaattaatgcgaagccctatttttagcaaaaactaaacctattgatcacgcttgtccgggaacctctcgtagcctgacatatgatcacatctctcgtcattctccctcctcctttctcacgtatataaacaccaccctcccctccggttgatcgatcatctcttgcatcgatcttaatttctcatcttttcgctctcgatctcctacagaagcaatagtagccagcaaatcaatcgatcgatccgtacaatggcggccctgaagatgaacaggatggccgtggcggcgctgttcctcgccgccgtggtggtggcgggcggcgctggcgctagcgcccacgtcggggttggggctggggctggggccgacgccggcgtcggcgccgccgtcggggctggcgctgacgccgccctcggggttggcgccggcgccgccggcgccgccggggctggagttggagctggaattggagccgccgccaacgtcgccgggtctctcaccggcgccgctgagggcgccgccggcgtggcacccaaggtgcatgtgtgagatcgatcgatcgatcgagcgcgccgcggcttccatctccacgactccatccgcccgcagcggctccggcgatccatatttttataaattcgcagtcgattgtttgttgttaatcaaagtttggttaatttatccgtcgagtgtttggttgtttatttcatatgcaaacctcgcgatttgtgataaataattaccgaaatgtatgtgtgtgtggggtgctaattcatccttcactccattaatttgttataaatatatatccttgtactagtgtaaatgtaataaagatcttaagttatgggtggatcatcatatactccccccgtcccaaaaaaaagacaaactctggtttccgttcccaacgtttgaccgtccgtcttatttgaaaaaattataaaaaaaaactaaaaagacaagtcacacataaaatattaatcatgttttatcatctaacaacaataaaaatacgaattataaaaataattcatataagacggacagttaaagttggacacggaaacccatggtttgtcttttttcgagacggagggagtatgtattgacgtaacgttgcttgattaaaattttgattgttttggtacggaatctaactcatggaacgggccatgcatgcatacctacacgtttcatcttggttaaaagcaaacggttcgatgatcgaacaaatgcaatatagaagaggcccaaatacaaagtggataaaagaccagcatttgcattggctgaaattgattttaatctagagatgtagtagctattattctctttaagcaaagaaccaggcatgaaaaaataagatagatagttattagcagtaaatttatatataaaaatacaattacttccaccactgttcagattactacttgtcgtattaataaatttccatcggagtttcttcctatattttacctccacccactctctcacccccccccccaacgccccaactatcatcattaataaagagcactaaaatatttttaaaaatttaatctctattaaataatctagaaatattgatattttagcatagataaagtattgtactttgactatatctatatggagaagacataatttttaataacaaatctactcatgcaaaatcaattaccttatgcaattgggtaaacagggtaataatggccacattaattatttttgtaaatgtattaagataacatgtgacattcatacaagaatcctgcactatatatagtgcgcacccggggcttggcaccttgtaaggagtaatcatgcaagcatgtcgccaaatgtaactaatttctagcaagccaaattaagcttcgaggctaaatgacaaattaagactctattaagcataggagcatattattttcttttgtgaaacacagtacaaacataaattacctatatttacatgcacatgcttacacgtatgaatgagtatacaccttaccctttgaatacttcctagagaccaaatcagcatgaattgagattgatgaacttgtcatggtcatggacgcctcgctatgaaaaccgatactatttgtacaacacacggatagtaagacaattgacaacattactatatgaacatatatttttttatcaaaaggatgccttttttttttggaaaaacaagagctaggagcatataattggatgtacacaatccacccacacatgcaaactttttctttaaaaaaacgcacatcctcaagtgactagttatttttttagcatcatattcttaaaaaaaaagttagacctttttacgttgcaacttactcttacttatattaaaagattagaaacttacacttaattacactataaattttaatagatgtactgcaatatttgtaatacacattatggagaattagaactaaggatgtgtttggataatgggaaatggagagtgggattaggattgagaaatgaatgaatggttaggattaaatggaagagggagaatgaatggttagggtgtgttcggacccaagggttcccaatccctctccatcgtattccgcgtgcatgcttttcaaactgttaaacagtgcgttttttgtaaaaatgtgtctatacgaaagttgcttaattaaaaaaatcatattgatccatttttttaaaaaaaattagctaatacttaattaatcacacgctaatggactgctccgttttccgtgcttgggtgatatgttcccattcatcaacagcgaacacacccttagcatttaaagataccttttgatgggtggaaaattattttcctatcccattatccaaacaatgcctaaaagtaattgattacctaagagaagataggagagatagacaaacattaacacattacatgagaaagataacatgatgaaaaccaagtgaaaacttactgcgaagccatatttttagcaaacacatactcacgcttgcccgggaacctctcgtagcctcacatctcgtcattcctccctcctcctttctcacgtatataaacaccctcccctccgggcgatcgatcgtctcttgcatcgatcttaatttctctcttcatcatctcgctatatacgtgcaatggcggtggcgcaggtgagcaggacggccgtggtggcgctggtcctcgtcgccgtggtggtggcggcggcgtacgtgccggcggcgaccgcgtacggctgcttcgacgactgctacgagcgctgcgccaacgggaagacggacgacgcctgcaactccatgtgcaagcaggcttgcagcggcgccggcggcggccccgccgaggcgcccgacgaggcttgatcgccgacgacgagcgccgccgcgccgccgtccatcgatctccatatccgcccgtagccgccggctatatatacactcgattatttgtttgtttgttgttaattcaagtttgattgatttaaccgtcgagtatctaaattagtttgttttgtttgtttaatttatgcaagctggtgtactctctcagcgatttgtaattcttgtgtgataattaagtgaatttgttcccttgtttcttctttgattaattaattaccgagatgccttgcaaaagaaagatcgatcaattaccgaaatgtgtgtgcgctgttaattcatctttggtggccaattcatcagtgcggtggaatccatcttacaaagatatttaatacttggctcgtaaaactatatatatatacatttttattatgtttagagaagagatattgggagtatacttgctaataaatatgggggaaggaaggaatagaaataaaaccttgtggtagatttatggtttgaacattttattatctcagttgttgtaggagatcgaatggcctctagatgacatgttttaactagaaactcatattaggctgaattgaactggttataagtggctattttgatgtaacaagtgttgttgatattttctttaacctatggcaaaacatgaacaataactatgttaatggatagctattgtttgggaactctagattacgttcatggatgtactacacatgaaaaagaagaaaagttgggtgtaaaattgaaagatagatatgttttttttagggggagggggtgtttaattgttactatctaacaaaagccaagtaatgcttatggcttgggcaacatatcctatacacataagctctcacgtgtacacacatgcacaccaactaacaaatatcataaaaaatctaaaaaatattcatgtatgtactttcaatagtattacacctagggataaagtcttaacctcaaattcgttatattttagttgtaacaaaaaaacaaaaaatctaacagttttaaggttgtaattctgtcagaattttgtcttttttactttctatgtagaattaatgaatttgaagatgtaactttacatgtagatgtaatactattggaagcaaatgtatgaatttttttagaatttttatgataatttttagttggtgtacacggtgtgtatatacgagtgcataggatacgctctctatggcttgctacccaaaattgaaagttagtatacaatgtctcgtttttcaagttttacggcgctccatcacaatgtttaattaagggcataaacaatagtttgacatcagcatttggaaaaaaaaactcatgatgttaaatattggaggatgtaaaagagagagattatcgttggtacaggtgacggatttgacgatgggccattggtttgatgtcaaaatatgcctaccaaactgttggtattttaaatagtaatttggctattgtttgatttactaccaaaatatgccaataagatacataagttaccaaaaacatttggcactactaaaattggcctataatttggcattgccaatatttggcatggtagcaaaccaaacaagcccgataccagtaagcaaattaaacaacacaattaagtacaaactttatctaagactgcattaattaattatgacacgaaaaattttgtactcctaaataacaacgttactaagagcaggaccaatagcaggctatatgccagctataaacacataacgaggagatgaaagaagagagagatgagcagcggactacagatttatagccagcagcaatacgggctccaagacgaaatgtatgtataacaggtgggactatatactaatagtgtagtatacgtttatatgctactattgcatgacttagctattaaattgactatagatgatttggagctagtaattggctatactattaaacttgctctagtcactttttgtgtcataactatgggcaaactaatagcttcatcttttcgcttatacttgtggtaattgtaacggctcattaactaataaaaaataattaatggacattttttataaatgtattccaagcgattttaaaacagatggtgtaaagtaaattactctctccgtttcaaattataagtctttttattttggtcaaagtcaaactacttcaaatttaattaagtttgtagaaaaatataataatatttacaacaccaaattagttttattaaatcaatgattatattttcataatatatttgtcttgggttgaaaatgttactatttttctctacaaatttgaacttagagtgattttactttaaccaaagtcaaaacgacttataatctagaactgagggagtataatagaaaaccacaaaatcaacttagattaagttttgaaatttacattttcactaaggcttataagacgaaaattaaacgatgggggtttaaatttaaaaaagaggaaatggatgcgacgcgtgttagtcgagtagccgagtccgacccaaaaacactcactcggcccacatcacgccaccaccccgacccaacccaaacttcttttccacgccgccgccgccgccgccgccgccccacgcccgatgccacccgccgccgccggctgccaccgctgccggcggcttcctccccaccgccgttgacctccccccacgccctcgccatgccccgcctccccctcctcccctcccgctccccccgccgccgccccctcctcctcgccattctctcgaacaccttctccgcgtccacccgcgcccctcccccgcctctccccccgctctccccgcttctcccgcgccgagccgacgccgccaccgccctcacccccgtcgcctccgccatcgccgactccttccgcgactggttcctcctgtcccgccgcggggccgcgggggccgccgcgccgcccgcggcgctcgacgcgatctacagcgccgtcgcggccgaggaggccgcggcgctcgacgcgctcccgctctccgagcagctcgtgctggccgtgctccgccaccgcccgcgccacctccccgacgacgacgcgctgctgctgctccgcctcaggttcttcgactggtcggggagccgcgggcggtactcccacacgcgcgccgtgtaccactccgtcttccgcctcctctcccgctcccgccgctccgccgtggtggtggactggctccgcctcttctccaacgccaacgcgacccccgccaggtcgcgcttccacgacacgctcgtcgtcggctacgccgtcgccggcgatccccagcgcgggctcagcatcctcggtcgcatgcgattccgcggcctcgacctcgacgccttctcctcccacatcctcctcaattccctcgtcgaggcgtcgctccatgagtatgctgattccttcgctcgccaccttgctgcaagtcctgtggcgacctgcattcgcatcaagagcctctgccgccaagcccgcagcagagatgccgtggctctcctggacaccctccctttcgaccaagcatccagtgcccctgcagctggctcgatcatcacagacttgtgccgccgtgggcgctttgatgatgcagctcagattgttgacaggttcccctccgctgatgtgtatggctcatggattcatggcctcgtcgaggccgggagactcgacactacgttgcagttcctttctgagaagaaagaagccgaggggtatattcctgatggacctcggtatgacaagcttacgtatcgcttgcttcgcagtaacaggctcggtgaggtgtatgacttgcttgtggaaatgatggaggagggcattgctccaggccgttcaaccatgaatgccgcgctttgcttcttttgcaaggctgggctcgtggaagttgcggcacacttgtatcggtcaaggatggagcttggggttaaccctaacaaggatgtgtacaacaatttgatcagggctctttgtcgggttggggacacagaagaggcgtgcctggtgttggagcaggctatggcagaagggtacttccctgggcgacagacatttaccatgtttgcaaatgtgttgtgtcaggaggggaagctagatagggtgcgagtgctccttgacagagcactcaagcaggaggcatgcccaacggacagtgtcttggccaagtaccttgtggcattgtgcaagagtggggatgtggaggcagcatgtgcagtgcctcagatggcaggcagcaaaagtcctaagggcttatatcgctacgaatcaacttacaagagcttgattcgggcattgatattgatcaggagggtggatgtactgccaaggctcttactggaaatgcaagacatggggcacatcccgagccgaagcctctatcagtcggttgtttgtgctttgtgtgaggtgagcaggtatgctgaggttctggagctgctgaacaaccagctgcaacggactgacctacacccccgtgtatgctacaactacttcatcgctggggctgggcatgctaagaaggctgacatggccagggaggtatataaccaaatggagtattctgggcttgaaccatcaggagacagcaatgtccttcttcttatgagttatctgaggagtaagcgtattggcgatgcactaaacttcttcaacttcattcgtgacaagaagacacctggcaccaagctgtacaatgtattcatatctggtctatgtgaagctcagaagccagagcaggcaatggtgttctggagggaagcgagggagaagggtttagtcccaagcatcagctgctatgaacagcttgtgctcctgttgtgctctgtgaaagattatgacaatgtcgtaaaggttattgatgacttcaaagaaacaggtcgccctgtttcggctttcttgtgtaacgtgcttctgttgcacacattgaggggcagtgaccttctgaaggcttggaaacgttcagagcaggcaacagtgaaaccagaagagatccagggtaagggggtaggacggttcttgattggcgaacttattatgatgtttgcaggtggtattaggaacatgaatgacttagaggatttagaagaggacctagaaaaacattttccagttgatgtttacacttataacatgctgctgcgagggttgagcatggtggggaggatggactctgcctgtaacttgtttgagaggctgtgccgcaaggggtatgaaccgaatcggtggacttttgatataatggtacatggcttctgcaagaatagtgacagggatgaggccgagagatggatggaagcaatgcaccgaaatgggttctatcccacatggtacactatgaggatatataacaatttagcgttgcgatcaactgatcataaagtcatctcatttgtataagtaatcatctctctgccaccgctttcatgccttggtctgctgtgatcctatgacttcactggaacaggtaaaactattatcagaaccttgttctatggttttagttatttaagaaggtactcggtgcgattcatttgctgttatgttttttgtgtaattccttctatgttttcttacaacacaagtcacattagacctttcgctgtgttttgcactctatcttggacacacattagcggaggtaatttgttaaacatgacaattttcagttggcagtcgcattcgagttccactgttaggaacaggcatgcagttgcttaataacatgtaaatacatatttatctatcctacttttacaagtccattttgtttgtacaattcatactgcactgattgaaaaccttttaccgcacatgaattggttgtgatcatttttagtctatataaatatctaatagaccaagctcaagttaatctagccttttgtattttccaagccaaggtaattcagtgcggttttctggatgtttgcaggcctaatttttgaacatcagatctgtacctgtggaagtttattcctaaatttaacatcactatcctctgaaccacatctcacctggcccaacacagttccaagatgcgtctaggatatcagttgacatgtaatctagttttacacaattttgcgatcacatgatatttttgtgcccagaattttgaggttttagctatccgatcattcggtattgtttcatttggttgtttaacaaccattagggccccactgtaatcagtaagttatatcaagcaatggtcattctttttcatctggaatttaagcactagaaaatagaagttgaataaatgcagattgtacaagttctgtatcaggtaagatgtgtgatatgctacttggcaacaacctgtaagttatatcaagcaatggtcattctttttcatgaccaccggcttttccagcttttggaagtggaacctgcgagttcttagttctttacatgctaactgtaacgaaattgcttttgccatcaagatagtattttctgaattgcttttggcagttcagtattcattttgctgccattctttgtttagtactcccgaagcactgtcaattgattgttttttttctgcttaatcatatatgttaacgatcttttaggttgtaaaattagcaaagaactaatgttggcacttcgaaggattgatctgcagaacagactaccctttgattatttcacaactttttataacgtacagtatcttgagataaaaactcaacaatcttttgctaacaattagctcgacggtgattaaagaaaacaatactattggattcaaaattcagttttataggctaacccagtgaactgcacgttgtaccatcggagagagaaaataaattgaaccattcagcattgatctttgcaaagaaataaatggatcacgtggaaacaatatgtacattacactgagcatgctagcaaaccaaactacctaaatttcgatcttatgtactatggttcattgaaatactcaaaagttcttgcactagtaggagcatcagattacacagcttattccacgaaaccaaaggtggagaaaagccaaaaattggggattgggcgtgatacaccttgagcttcagtcaatgtccaagctagagtatggctcatgaccaacctgcattggtttaataatttagggcatcatcagtctatgcatattgaaagagttgcgcacaggaaaagaaaattgcaactgaattcttatatatagtaacatgagcattaagacatgaggtgtgtaattaattggaagcaccaaatctagcacataaaagagcagagtttgcgtgataactggcaagttgttgctacttagtactcactgagcaatcatcatgaacacgccagattgtctcgcctaaaaggttagcaactgaaaggatagtcagctgcgggaaactcttgtcctccttgagaggtatagtgtttgtgatgattacttcttgaaacaaaccacttgataacctttcaatggcgggcgggctgaaaaaggcaatgtacaaatattataaattttccacagaaaaataacaaagcatgagtcaaatttaatgtcaggaacgttatctttgctgcatagtcaagtgtggtaaataattgtaacctctgtattgtttaggagaacttgtacaaaactgagttccaccaaaagcatgaataaagtatgtctataacataacaaaggattctgagcttctccatggtaaatcaagttcagctagcttactacatcaatatctactggaaataccatagttggtacaaatatagcatacctaaaaacagcatgtgtacagcatgcatagacttctcttgctccttcttgatgcagcagctcagctcctttggcaatagttcctaatttaattggtttcattagaatattgatatttggaagcgaaatatctcaaagaaaggcaaagagtaattttagttgtgtgtgcaatttaatgctaaaattaaattctcaactgccttggatgaatcatgaatgagaacagttcagatgagaacttaccagctgtatcaatcatatcatccatcataacagccacttttcctctaacatctccaataagattcattacctgtaaaaaaatgaacatgataaactgtagtggtttaatctcacaaagcatgaaaatttaaacaagtatgcaacatgtagtgatatagactcgtctgaaaatgcattaagtactataacatgcagattgaatctaggaaaaggtgccagagaatatttccttctatgcatcatcgtagactgcagttaatacacacaatatggagaagatcagaagaacttagaacgaactaagttatttttcctacttgcattcataaatgtttatcctgtataaaccagaaagcaaagaatgctctacttgcctcggcaacattgtgtccatgccttcttttatcaacaattgctagaggtgcatctgatagctttttggcaaaagcacgtgccctggcaacacctccaacatccggagacaccaccaccaggtcatctgaacatattgtcttgctggcgaggtaatcaagaatcacaggcttgacagatcaaagaatcaaaaagaaagacaaagttataatcataaatgaaatcacatgcaagcagttatcagtcaacatgcatcagtgcatacctgaccataaacatgatctactgggatgtcaaagtatcccatggcttgactggaatgaagatcacatacaaggacacggttcgcaccagcttctgtaatcatattagctacaagttttgcagctatagattcacggccttgagactgaaagcaggaaatgcttttgttagttttgacatgctagccagagtgctgtgccataacacaagtcttcaacaaattgagaacttcgacaatatattcttgtttcaaaaaaataagatgttcctcagatgttaagacaatatgtaatgctactgattcctgactgtgaggattccacaaatggacacatagactaaactttatacaataataaagtttgtccgtcattgctctctttgtggaaacaataataaagtgtagtgttacaagcatgtgacaaatgccactcaaaaaataaaatgatcccaaaaccactaagataatttggaggcaaaaaattgtatgacaagttgacaacattaccttcctgtcagctctggcataaccaaaataagggatgactgcagtaatattcttagcagatgctctcctacaggcatcaatcatgatcagaagttccataagattctcatttgcaggagggcacgttggttgcacaaggaaaacatcgcatccccttacgctttcttgtaactgaacatatatttcgccatcagcaaacctttttatgttaatcttcccaagttctaagcccaagtaacttgctatttcctgcagataagacaacaagaaaaacttccatcttagtttggcactgtgagattaaccattcagtcaaacaagtgctacttgtaacaagtcacacttaaatactactgctagacttcttttgaggaccagctgtccacttttcatagttcatggctatatgcctctttaagcctaattatgctcaatgtacatttttgcatctaccactactaacagtctgttttccggaagttatggatgaactgaataatattcaatatcttgatgttacaaccacagtaaaccacatagcccaattcgttgcatctgtcaaatttgaaacaagagaatgcaaagcatgaaaaagtaatgagagattcagctgacctgggaaagagaagggttggcagtccctgagaagatacgcaaccttgtatcattcttaatattcgcatcccggataatcggcagcgtcacaggacttaacaacgatctgttagacactggagcgtatggtggtattccattgactgccctcagttgatcaatcttcttgcacctctgcacgaccaaagatcctttcagcttaagtgtgcaggagtgcattaatccaatccagtacactaaattcaacatgactacacccacacttgctttgccaccttatagcaaaagaatgaaccccacttttgtttgaggcgaacaaatttaacacaaaaaaccaaagcacgcacagctccaaacaatgaacaagaatcgaaattccttgtgcaataaacacaaccctcccgtaaatcagccaacacaacctaaccaaaagtccaaaaccaacttaaaattcgacgcaaatacacctcctaagctccttgccccatcacaaaccatcgcaacatctacaaccctatcgataactgcatactgatcatcataccactgctgcattaggggataattttttttttcaaaaaaaaaaaaacagagcggggcaaggagggtggcgggagctcaccacgacgacgggggaagagcgcggcggtcggcggaggaggccgcggctgcgcgcggcgagaggggacggcgcggcggcggcggcggctgagtaggagagcggcatcgggggacgcgggggggggggggggggatggtcggaggtggatggctagggtttaatttgggttaagttggggtttacttccagccgccggattattagattttaaggacacttcgttgattggtttgcttgtacttttaccagtagatcgttttcttcttttcttttttttttcccgttctgttttggtttatgcagtcgtgtgatcatgtgtcctcggagaaaagtcgccatcaaaaaatgggggaaaaaacaagccagcattgatcagagctggagcagtgaagtggagtagtagagtagagtaactttttttttttttgcagggagtagagtagtatttctttttgtaaggttatggttttgaggtttttaattgatactaactggactgttgttgagaaattgattgttttatacttacctttatttttactactttcaaaagtctaacagtggttcctcgcaaaaaaaaaaagtctaacggtggttgtgagaccgatattcttctattcgagatgtatcatcacttcgttactatcatcataaaaaattggtaatagtatcaccataaaaattgtgctccctccattccaaaatatagggcacaactactttttaaatgtgtttcataatataaggcgtgcatgcatgcatgaaaattaatagcaccttatctctcctaaattattttttttaaaatcaagatgtttaattctattgtgtgcatgtattatattagttgagaattcttggtctttgggtaaagggtgattgtgccttatattttgtaatggagggagtattcgctttgttctattcgcgatgtaccgttgtaattctcgtatccttctggctgatcttttgcacagtcaaagaagtattccatctacgttcaaatccctcaatggctagtgtcaccgtcactgttcccccccccccccccaccataatgtgtggcttgctcccatcttagccttgtttggatcctctgagctattaaatagccctccaaaatcttgctatttaggagtattaaacgtagattaccgacaaaaccgattccataacccctaggctattttgcgagatgaatctaatgatgtatattaatccatgattagcggctgattactgtagcatcactgtatcaaatcatggattaatatacctcgttagattcgtctcgcaaaatagcctaggggttatggaatgggttttgtcagtaatctacgtttaatactcataagccctccggatctaaatagggctcttgtcaaaccaccaccaactatcctaccatttttctcgtaataccatcccttctcccccgccctcctttcctttcctgttatccggcttcaataaggctgtgttcgcatgcaccttttcccatcccctttccctcgttttccgcgtgcacgcttttcaaactgctaaacggtgcatattttgtaaaaagtttctatacaaaagttgcttaaaaaatcaaattaatccctttttgaaaaaaatagctaatacttaattaatcacgcgttaatggactgctccgttttccgtgcgcagaagttgggttcccatctcccccatccgaactcagcctaagactgtttgcatcatctatcgtaggagtctcggatttaggtatcgctttcaaaggatccaaatatttttgttgttgtcatttgacctaccaaccgatgtgtcccatttccgtgcaggttgtgctcttgcccttatccttttctcggatttggtgtgaagggctagagcagcaagtaaaagatgcacaactaatttcactattttttataggaaattgttggttgtaaaaatagcggtaacctacggcgaatgcttatcgttatcaaacaagttgtcaataaagattactactttgcgcttgattttaaacgatctgttgtaagtatagtgtgccctgcaagatttgagatcgtgcttgttatatatacattccattcttcaaaacattagtatcttctatcatcgatcatttatagtacaacctaagttcaaaagaaattaactttttgtgatgaagataaggagttcctaaaaagttgcatgtcacaagctagagactacggttatgcaactttttaccaattatggatggagattcataaatagactacaataaatgtgttctctcattgttagtttggtttatccgttttcttttatggtgtgttctatttctttagattcacatcttttctcaaatgttattatgtaataattggctgtagctctttttagtaaaggccgggatactatattccattatcttaaaaaaaaagttcaaaagaaaataacttttgacctgatttgtagcaagaagtttctttcttttcttttttactgagtaacacacaggcacatcagaaaatcaaaaaaaagaacttaggtctaaggagtagttcatagacgttaaaaaaaatgactttatgatatcctgggggcgttttttttgagaaatcaggatgatatcttagcattgatagacctttccttccaaaaatattaattcccaccccacaaatgaacaaacgctgttttcatcacaactgaatttataaatgtcaaatccaagatcgaaacactaatttactgttttttttcttttttcttttttctagggaatctttatcatcgtaacttctgtagttaccattttaccagtcgcacattcgcactaattttaggctaagggcttaattacccgcgttaatgatggataataaaaacctgcagcgagaccctggcgttttcttctcctcttctttccccggtcttggagggtctcatccttccttccccctccattgcatgcatgcgcgtcgcggttacaattaattaaaaccgcaagcgcatgcatcttaatcgcccccatgcatctccgcctaaattaaatcgatccatccatcgcctcgcgcaattaacgatccatcgatcgaatcgaagctcgctagatttcgagagatcaatacatacatctcatcaatttgggttgcatttgagagagaggaagaggaagaggaagagaggaggagaagagcaaggtagctagggtagcttgggcatggccggccgccggttgctggtggcaacggcggtggtggcggcggcggcggcggtggtcgcggcggcggcgctggaggcgatcaacgtgacgacggtggcgttcgaggaggggtacacgccgctgttcggcttcgacaacatcctccgctccgccgacgaccgcaccgtcagcctcctcctcgaccgctccaccggtaatttttttgaattcttcgattgatttgcgcttgagaaattagttaattaatccatgaattcatggatttttttttcctcctggttaatccgattcgaatccctaattggctcaccaggctctgggttcatgtcgtcgtccatgtaccagcacggcttcttcagcgcctccatcaagctcccctccgactacaccgccggcgtcgtcgtcgccttctacgtacgtaattaagcacaaccaccaattaatttaccccgttttgatgagagtgaattttaaattctcgaggaatcgttccttatcgattcacttaaatagttagaaaaaaaatagaaaaatgagaacatatattaacagtgtatcaatccgtaaatatgaaagttaaatttcaacttttaaaaattgtaacaaaaataaacaaactaaattatacaactgattagcgtatatttgcagttaaatttgtttttttcgttgcgatatctagaagttaactttgaccataaaaaaaccttttgatgagagaattttaaattctcgaggaatcgttccttattgattcacttgaatagttatggaaaaaaatagaaaaataagaagatatattaacacttgtatcaattcgcaaatatgaaagttaaatttcaacttttgaaaattgtaacaaaaataaacaaactaaattatacaactgattagcgtatatttgcagttaaatttaatttttttcgttgcgatatgtagaagttaactttgaccataaaaaagatgaatattatggaattacttaatatcaaataaggtgaggatttaaatccaagtcgtctagcccatcaccttgtgcagctagctggaaaacgactgggtgtttctcaaaatttgaccatacatatgtgtgatatatcacaaattagtctatctagttgaatttattgataatcattttgaatggtatgcaaataagaggggttatctcggagtttagaatttacatcaattaaactctaatttaattgattaattatattgcagacatcgaacggcgacgtgatcgagaagcggcacgacgagctggacttcgagttcctgggcaacatccgcgggaagccatggcgggtgcagacgaacgtgtacggcaatggcagcgtgagccgggggagggaggagcgctacctgctccccttcgacccgaccacggagttccaccgctactccatcctctggacgcgcgccgccatcgtcttcttcgtcgacgacgtccccatccgcgaggtccgccgcacgccggcgatgaccggcgacttcccgtccaagcccatgtccatctacgccaccgtctgggacgcctccacctgggccacctccggcggccgctaccgcgtcaactaccggtacgggccgttcgtggcgtcgttcaccgacctcgccctcctcggctgccgcgtcggcgaccccatcggccagatgctctcctccgccgcctgcaccgccgccgaggacgcgctgctcgcctccgacctcgccgtgatgacgctggagaagcagcaggcgatgcggcggttcagggagcagaacatggtgtactcctactgctacgacacgctgcggtacccggcgccgttcctggagtgcgacgtcgtggagtccgagcgccgccggttcaagggcagcggccacctccgcctcgccttccgccgccgccgccgcacccgccccggatcccggccggcgaggcccaccagggccgccgacatgtagcgcagcacataatcatatttgtttcatcatttcatcgtcgcgccttcgagtcatgggatgatcgaaacgggagcaaaagaaaaaaaaataacggacacacgcaacgaccaattgggcccacgaggaaaggagaaagcggccaggcccaatttggaagttgaaggcccattccaaattgggcctgaattctagtggttgatccaaatgtcatctttaattattgaacccgacgtggtatatcctaatctagaaaagcatatgcatggatataccgttccaaaatacacggatataccgttccaaaacccagacatttcatgaactaaagaacaccaaaacatttcttcggaagtagatagacagaggaaatacctcgtttcccacgtgcacatttttcaaaccgttaaacggtgtgtttttacaaaatctttactccgtccctctaaaaatataaggattattagttggacacgaagactaaataataggaggaggttgtgattggttgagaagtggaggtagctgagaaaattaaatgatgaagggttgtaattgattgagaagataatgttggtgaagaagttattatattttaggataaatctaaagggctaaaagttgttatattttaggacggagggtgtaataatcaatcaatcctatgttaattgttctttaaagtatcttctctaatcgtgtgttctcagtcactcccttgcaatcgatgtaatgcggtgacgtggcacacagtaggagtagcagtccaagtcatagcaaaaccagcggagcagcaaagtgagagcggcacacagagagacaggtagacgaacgaggtgacgtcactccatcgagcccatccagcaaggcagagctgatgctgaacccctcctccaagacacggcacgaaaaaggcatcttccgggagatactagaaaacttcacgacacgcaggcgcagatgccacgagcagccgctgcctcgtttacccaaacccaaacaccacctcctcctccgcctccgcctccgccgccgtaaaaccctcgccgccaccgccaccgcctccgccgccgcggcggatccgctcctcctctccctgccctgcgctgcgcggggcgtggtcgaggctcgacatggtgctgtgggagctgacggcgatcacggcctacttcctggggctcaggcggacctaccgcctcgcgctccgcatccagcgccgcctcatcggccccaaccaccccaggatccgccacttcgtctacaggtccctctcctctccttcccctccccacgccccgcgcgcgctctgatccgagcaatcggtacggattcgcggcgcggggacgcccaaatcgatacggattcgtccttgatttcatctttgttgggggaaaatcactggggcgaatcgcgtgtactacagtaccatgccactgggtagaaattgcgggcgcgccttccctgaaatctgtgataaacctgtcgtattgtgatgttgaccagcttcagttagctcagaaatgtcgctggcacaatacggggcgctaggttgggacattgccagcatttcgtttgggttgtccaaaccacagctttgctgctacatcctcacagctgcaattcgatttgtcatgttcattccgatgtgaccgtgtcaaccatgaaacttacttgcactatacccggtgttatacacaagtcccgtaatgaaatcttgtcaaatgctcctatttttgtgatagattgctcaacatggaaatatccctcaatcctcatatattcattttcctttactttgcaataaaagagattatacctgaatctcacactccatttatgccttccatccgcactttggtttgtactcatttgagatacagatacctgtaatactaatacgttaccttatattactaactatgcctccgcttttgcctaatgttactgaaccatgtaggcgtattgtccaaataaaagttcttgttatgtctctcgaaaaggagtatagtattgtagttttttggtgtattatataacctggaagttccatagcttgatgatccagtgtttctagcatgaaattgaatttttgatatgctgacatttttaaaatgtacacattgtactttatgctttccggcttgtccattgttgttcagctggacttgagcaaagtaactgtgatgatggatctgcatattgcgtacacaatcctgactccccatccatgtaatttttctggctaattttttggttttatgccatacctcacacgctgatggtttcaaccttgtccatatgtggatctaacaataatcctgtccagtctactaaatctgtccaattgcctttgtaaaaactaaggattgaaatgattcagataagcagttccttaaatggagtttcatcttcagttcttttgttgatccctgaatagttctagctaattaattactatagtacacaatattacatagtcatttcaattgattttacgtgaccaaacaattcttctctgcaggcgaacacgggatgttttcaatgttgcggtttcagtgcacaagaacattcagcagagagacctagaagttggtcggaaccttggtaacatgatccttcgctggcttgaccgcatgaagccctcagcacagattcgtccccatcctccaggcccaccaaatggcagctcagagcaattcaggcatctttcgagtacaagcaagagcacaggagctcagaagcctacatccaaaactttaccgtgcgatggtggaaaggtgttgttttcacctctgaacattcgacccaagtccttccctgttctaccgacaatgatgcagcccaccagaattagtgctagcagccagtgtaggcggatttcctactcatcattcccatcggccaccgctaagaggaatgatttcatgcagggtgtgttccgcaaggacattgcacagctcatggtgtgatgatctgtactgtcctggaattcaaagttcaattgacttagtttcgcgtagaacagaagtctcatgactcatgggtgatggatcctgcaataataaagggctgaacaagttttttgttgctcaaccagtttagcaaatagattttctaaccaatgatcataagacagtatgtggtattccataatggatatgtttactccattcgtccttgaaatgcgcaaaaggaactatgtaggattgaaacattatctcagattctcactacttcctcttcacttctctttttttaattgtcagatttccatttcagaaatggcactactttagagatatctcctttctccaaactgggagatttctttttcctaggaggaattcacctttaattttactgttgtatgacccacatatggaaatggttgaatctgttgctgttgcagaccacaattcctggaattttttttgggaagataaaatatttacttgtttctccacatttccttgtcaggcagcagtgcatggcaatagtccctgagctagcgaatgattccatatttcatatctgatatatgcactttattcgggagcttgaaaagaagtgatatgtgtcatttccacgaaaaattctcatcttttagtgcttgtacccatcggccaccgaataacgaatcgactaattacagaaaagccatggatgattagcattaccactgaccagtgtacatatatacacacactgactcactgagaatctctcatcagcaatcacaactgaatttacagtctataggctcctagaagattcttattccctatcaaattgtgcactttttttaaacttcggacagtcggtactaattgtgatcaaaattgtaacaaatgcacggtcattaagttaattagccagtatcattacatgacattttggtcatttctcatcaaaaagcttaaaatgcccttaacatgcgtgcccgtgtagagtggcttctataaatagacaagctaagctggctagctcgcccaacaacaagaagtgcataagtgacacactgattaattaagcaaaaaacagtagtagcttaatttgctaccatgtcgatgatcactagcatgctggggcggaagcagaacgcgcagcagaagggcggaggcggcggcgggcgcaccggcggtggcggcggcggcgagatcgagccggtgagcgtggacatcatggagccgttcatggacgcgatctcgctgacggcgttcgcggcggcgccgtcggcggcggcggcggcggcgggcgtgccgtcgacggcgagcatggactggaaggagacggcggcggcgcacgtgttcatggcggacatgcccggggtgcggagggaggaggtgcgggtggaggtggaggaggagaaggtgctcaggatcagcgggcagcgggcgcgcgccgcggaggagaagggcgagcggtggcaccgcgtcgagcggagctccgagcggttcgttcgcaccgtccgcctgccgcccaacgccaacaccgacggcgtccacgccgcgctcgacaacggcgtcctcaccatcaccatccccaaggacaacgacaggaagcctcacgccaggatcatccccatcaccaattaaactaactattaattactagctaatattccacagcttaattatcgagtaattatattagtactgttaattaataataattactactcctactactaataataagaagcatcatgcagcgtgtatgattgcattatatgcatggaatagatgtgtaaacaactcaccagtttgcttggtgaaagctgtggcataatgcattggaggaatataagaataaattttggtgtgtatgccattttaaccttttattttacaagagcctattggtaaatactccatattattattcggaccggcagatggagacctaatttctaaagatgtacggcctccctgcgttgtgccctgctggtgcgaaacaaaaatctaaaaagctcggcaagcagtgtgattccaacagaaccagctgccttgttaacacagcttttaattttttatctcatggttcatggatgtttcttctacacataaaaggattaaaagaactcatgcaatgttcaaatatatgtgcagatgtgcttcaaagagcagcaacatataccctctgaaaatactcaccaccaccgtgaggactgagaataggggcctgtttggtacagtttcaacttctaaatataactccaggagttgagtctggagtggagttgtggagctgtctaaacctagctccacaactctagtacattttgtgagagagctccacccaactccactcccagttttggtggtgctgaaactgtttggctgagctccagctccacctggagctgtgccaaacaggccctagatagtagtgagagagtcgagaggcggattagtgggccttaattgttagcctggcccagcccaatatggcccaagtatagagattcagagtttactgctccctatgacttttttcttcttgttctttttctttgttgatttttgttttttttatctatactgtcatgtcagctttgttagctacgtaagccctctacttgcagttagtaatgactcatgatgcaaggattaaggtaatatcggtgtattggagtactatataatataagaggttaattaagatcctacgtgttcgtattagctataagtttatattagagttagctcgtatacagtacatgagctaagatatcatctctatttttcttatcctctctttcttccacatctctatcagtgaatgatgaaccttaaaactctactctattgatccacgtcagaaataaaaaacgtataccaacttattaccaaaaagcaaaaaccgtacgatcagaccggtaaaaaaaaaaagaattgtctgatcttctagagttttcaagagcatgtgaagagataacatttattcccttcctctcgtaatataacaccctaatattaaatgagagacatgtattataattcacggataaatatgtcacattatatcctaaattattatattgtgggacagagggagtaccctatataacagccaacatttctttttttctcttcatatctatcctctacatatgtttctaacttgctattttaattacctgctctaaaactacaacgtgctctccactaccaataatcagtcgtcaagcaattaatcaactaggttaacttgtctttcctcttagctgtagctgctgtgtgtgtttttctctttcttttctcttatttttatttttaatgcagttattgcgtcgtgattaaattaatggtttgcacatggtccacatggtgaaggcagcaacgccagactaaccggttgccacatcaaatcctcaatcaaccactcagaaagatgcaataatctacctcattatatgcatgcttactcgataataattgccatcacctttcgtgatttgattatttgctcatccatggaccatataatctctccctctcatctcacctaccgcaaaaaaatagtattagtactctatttatccatctcaaaaggcaaagtaaagcaccacaagacaaaacaataatgcattttctctaagtgctttggtttatcctatatcaatttttttttaactttgaccaaacatacaaaagaatgtatcaatatttatagtaataaattaatttcattaaatatgccattgatatattattatatatctattttgtgttgaaaatgttgctatattttactacaaatttacttatacttttttttgaaaaaaataacttatgataaatcaaaacaacttattttctaactttctaaaatgaaggaagtacttaaataagcatggtttcttacatttacaactaattatttctttcgtttgaagacaaaatacccgttaacagacataagacatgtcgctttagtctcttattacttgtaaggtaaggtgtacatgtatgtttataacaataattagtgtgtacgcatttatatgagtttctgcctatgatgtatggaaaaagaatatattgtacaagcagataaatcaaatgagctaaagttatgaggtcaaaaaagagagagctaaaattaaactaaaaataataatagtactaataagctttacgcccttgtgctgcagtaaaaccccaaaagtagaagcaaaacgagcccacggatagcctcatcgccctattgacaattctacccctccgccgtcggatcaaccgcttcgcctccgcctcctcctctcgctctcctcctcatcggagaaatctcgccgccgccggcgatgggtttcttccgccggatcgccggcatgtttggaatctccagggacgacgccgaccaccacccccaccaccaccaccacgacggcgccgcgggggactccgccgccgccgccgaagtcccgcaggataaggtcgtcgccgccgcggccgccgcggcggctgccgggaacgtgcagaggcgcgggttcagcgtccaggtccccgtccccgtcgagcggcccgggcccgggccggtgctcgtgccctgtccccagggcgacggcggcgttcaggtaatcggattgtgcggttgtggtggtctcgcctgtttgcgcgcctgtgttagtacgatctgggagggaggtttggttatcggaagagcgcctcgttggatgttgatgctagtattgcttgctgaaaatgggcgaccttgctgtagtggttcccagaattgtgatgtagaagaacagtagaagagctcgaagcagtagctatttttaggctctaagaaagtcatgcaatgcaattcaattcaattaaattgtgctgccgcaattgaatctagtctcggctatgcggctatgccccattcgatgttagctttattataggattggttatgttaatgttgatttgagtgcagtcgtgagttcttcgactttgttctgtgagatagtattgtctctgcggttccacctcttgtggaggtagttctaccttcctcttttaacctccgtgaacataagattagtccagcgccaaaatacgctgcttcttgttctatgattatcttagtaggcaatgcatatgcgattggttaatgcaacggtgcgttttattaggatgtcttgttatgtcaaggaagatgcaatagttaagtagagagtggtagcttagcttactttggtgaattcttacctactaacatttatagtttgtgggatggaagaaaggctaggcacagatttccttggatggatttgatgagtagaggagctcacctaattttagacataagtggatcacctttgttgttacagatgatagaaggttttgacttgggtttctgccactgcattaattgttcagaaaattggagtgcataggttatatctttggcttacaaactctttttattgatatagcaaatctttcactattttacaatcatggtttcttcacaatggtgtacgtatttttcttcgagctaatcttgttacatctgattgtccatttgtgcattttgtcatctgatacttgtttggatttggttggtgcgttgttagcatgataaagtctttgtgatctcctctaaaaatacgagagcaatgctaattctgcaagtcatttaaaccatgaatgttattaagacctagcactgtatattgctagtggagcactctgggaaccattgttacatataatcgacaaaagttcacaaacctatttgcattataggaagttttcatgcatagtggacctcacaagtctggctgctatttatattgttgaaaatttctgcagatacaagttatggcatgcatcatatgggcatgcaaaacaatgaatatttttcaactgggaatcattttaattgttggtttaaaggtcatatttaatttatcaaatctgcgaactgcccaagtcgatacttgtgctgcagtgtatacaaggttgttatattaaatgtaataaattggaaaataccatttgggcattattgattaccaaatttactattctttggaagctttagataatgatgtatgatcgcgccaagctgccgactgtcaatgaatattatcaccaactttaccttttataaatttgttggtgcataatagacagacactatggggaacatctagctagtaatgttgatattcatacattcagagcacggtgttatactgatattatttggtgcccattcctcctttttattttgtcacaattttctttttgttgttgtggacgttgcacattttatattgtatcctcctaagatatttcatgcgagtgtcagctgacaattatggtacttgacggctactcttaaagcacatggccatcacaacaacctttttttttctgtagtagaacaatttcaatttggaatgacattcctttttcatggattggcagatgcagataatggtgtcttaccttttgagtgttttttttggatgtttgtgttttcaacacattgatatgttcccttatgtatttgaattaatcatggattctcttcaatgctgtcaacttgctgtggtttgctgcttccatccctcttatcataatgatcattggttttatttttgttcgactagggctttaggtggtatacaaggaagctaaggattgatgaggatggtgatgtcgcagatgagttcttggatgaagttgttccagaaatctcgatcaacaacgactcaactccagctggaagatatcaagtgaaatataatacaaaatcagctgctctagcaatgagaaagcaaatatccgtcattgatggtgacatctgtcattccttggagtaccaagggcgcctgcgttgggtgtgactgtcatgtaagcttgagttgtagtgtgctgtcacctcaagaactgccaatcactcttggccaaaggattgcaagaatttgatatgcgcgtctgccttggagcctcccaggagtgtggatctgtggagttcttggttgatgcgtcattcttaaatttgagtgttttgggatgcctggtttggtcccttgtaccactagcagtagttgtacattgttgaacttgaactgaacaattacaggagtaaacaagctactgctagaacagcagaaagggaatgtgtatttgcaaatagagccactgaatccttgatcaatctattttgcattacacggagtgatgtgttgattttattgtgtcttttgtttccattaatctccggaatttttacacatacatcttgtttaaataagaaaaaaaacaagttattcgacatatatttcccaaacaattctatgcaggacactagcacagtaaactagtttgaaaaattttaaccgcgacttaatcttgtacgaaatgatgcatgcagggcaaaatcttatttacttccttcgaaaactataattgtggactatatgtatcatatgcataaattgctgttaaatgattatagtacgacgaatggaagttatatagctatatttatgatgctacgtggcttcgataatacactatattttcaagtaaaaacaagtggtataaacttgaatagtgttaatgccaattatccgagaacggaggccataactttcacttgacttcttgacttcctttttaataagaataattaaatgagaagatagtatatgatctcaaatgattggattaataataaattaatcaattctttgatagtatatgatctcaaatgattggattaataataaattaatcaattcttttctaatacgaaaaatcaattgagaagatagtgatctcaaatgattggattaatgaataaaataataattagttgagaaaaaagatatggccaggaggaatccaagatggcggcgacggttgttgcagcgtcgatccgaggtgggccatcctatccatccatctcatcatcccatcgcccaatagctttcctccctcctcctccgctcctcgtccaccatggaccaggcccacgcccccttcgtgggccccacccggcagtcacccacccctacccacgcggcccaccgtggacgcggcccacgaacgcgaacccgacctcccatctcttcctcctcctctcctcgattcctctccctcccaatccacctcctcctcctcgccgccgctcgccgccgcaatccgctcgccggaggcggactcgccggcgtcggacgctgcctgcgccgagggcgctgctgcatttgtttgcctgtggctcgggggaagagcgagcggccgtgtgggcttgctctgctcgagggccgcgttcgcgtggtttctctcctcgtgtgggttgctagattaaggttggtgaatggtgaggggttgaattgtgtggcctcgtcgtgctcgattgcttttgcattgtgctttgcgtggattctgatttctcctccaatttaagctagtttgacatgtatccgatattgacgaggggtagatagaattcggtgaattgtagatttggtttggtgcatcataatgcatttggtgttttttcaaatttagtgggaatttagattagtgtccagctgaggaaatacgggatcgagacagtgagatttgtcattgcaaaatctatcatgtttttccccttctttgctgttcataccaggattgtttatttcacccagcaggtggcctttttgctatcacaatttatcaatatccgggttacaatggaatgagtgtgcgagtttggttgccgggaagcattgttgacgaatcagatgggtactaatgatcctggcacgccgtccaaggcaacaaaggcatcagaaccggtaactgatcactcatctactttctaaatgaaccttttctgcttaatttgtcttacctgtattagcctaagacaataagattggttcttattattattttctagtgccccttttccccatatgatgtatgctgttagtttttctcgagaagaatgctgtgttgctgccaaattaagaaatgtgtcgaacatttatgataaagcatgaattggaaagaatgtgcatattctgtttttatgcagattatttggactatattagagtagcaagatattctggcttgtattctatacttctctttgcatagataataataatatgcctatgtggacagaacgaatatcccttcacagtagaagtacagaacacatatgtcctgtttctttttcacagacgttttattttatttacctctttttatggtttcttgcttgcacattctcaggagcagtctccagccactacatctggcactacagctccagtttaccctgaatggcctggttttcaggttattgcatctttacttattaagatgaacttatagctttcctctactggattttcaatttaattttaacgacataacagtgctttatattttgttttttaaccttgaaggcctactcggcaattccaccgcatgggttctttccacctcctgttgctgcaagtccccaggctcatccctacatgtggggagctcaggtaccctttgtatcttaaaactttattggttccttttatctgatatctgttgaaattacgggaaaagtggcagtaggagctttgtgctatctggaatctaggtctggcttatccggactaggacagtgtgctaggttaaattggagcaacgtaactgaatcctttactaaatattattatctgtttttactttaatactcactggacacaagcatatagatataggtaacatcaaaatgtagatggtttcatctttcaaagatcagaagaattagctagtatgcaacatgtagattatggttctattgttaaatcaggtggtcgagtgcaatgcaaaaaattaagcattctgccggaggtaaaaaatggctatagaagttaggcaactgcaaactgctttccttaacagcatatttgtgtgttatttataactattttcttttgtacctcaattcaaaatattgtccctttaatttcagcccatggtgccaccttacgggacaccaccaccttatatgatgtatcctccaggaactgtatatgcacatccctctactcctgtatgcattttctacctgacagtcataatcaataatcttctctttgtacttgcacccatttattgacatgcttgtattaacaatgaactaattggtagggtgtgcatccatttaatcactaccctatgctggcaaatggaaatgttgaaactgctgtaagtaacccattttttttaaaaaaatattttggtgatcatcatgttcatgcaatcctgagatgcttctttcagggaactgcaccaggtgcttcagaaattaacggtaagtcttctgcaatgtcaacatcaaggttttttgtgcaagtaattcacatttatgcttctgatcataatttcagggaaaaatgagcttggcagaacatctggtccatctgccaacgggattacctcccacaggtttttttttttaaaaaaaaatatgagttcatttagttctgacaaaacctaatctcaggtagcttgaacatgcagtgagagtggaagtgagagtgaaagtgaaggaagtgatgccaactctcaaaatgtgagattgatctctatatatatttcattcaaatcacttatttggtgcattctttaggcaggaagaaaaatcattaaccttgaaagatagcctatcaaccctgttttatgttgctccaggattcacattcaaaggaaaatgatgtaaaggaagatggtatgtacttgaggacctatttatggttttgtgagacaccaatagagcatatttctttgtgtgagattaagtatgcatttgattatgtaggtagttctcagaatggcatatcacatacagcattaaatcagaacatgtcgatggctccaactcaaacgggtgtagtaatcgggggagttgctcccacaacaaacttgaacataggaatggactactggggtgctgctggttcttcgcctgttcctgcaatgcatggcaaagcatcgtctggttcagttcgaggagagcaatgggtacaagtcctttgacaacgagcgtttgcattatttttttgataagttttgaattaaaatccttgtatatggtaatagaatggtagtccacaaggcaagaaaaaaatttgctctactctagccataacgacttccataatgaatgttaaatccacttattttgggaatggggattagcatgtggcaagatgccatcttttaattttgaagggatgatttatatatttattttggaaagggttgttgtcttttgaagatgcttatttttattctttgcccttgtgtatatgtcaatgtaaagatgtcgctacttgtataatttaattataccttggccattttcaggatgaaagagagctcaagaagcagaaaaggaagcagtctaatcgggaatcagcacgtagatcccggctgcgcaagcaggtatgatgttaaattgttaacatgacattggactcgttattttcttcagaacatcatggatagtcttattgaagcaccaaaatatttgttccaggctgagtgtgaagagctttctgtacgcgctgacaatttaagggcagaaaactcctctcttagggctgagcttgaacggatcaaaaaggagtacgaggcacttctttcacacaatgcttcactcaaggtggctgagctcatgcatttcctgagtatttaatttcttcgtgtttacttgccctttatcatctttctgtgttggctccatgaaaaatgttttgcagctatgaatctaaactagtgaaactctgcagtattgctggaatgttggtccatgttgcaacgtctgaacctatttatgcatatgctcttgttgtgatgtgtttctttcagattgttttaatcttgttttggccacagatattgttgtctgcctcattggtgatttaatatttgcaggaaaaactagaggggaacagtgattcaataccttatatgaatgaacagaacgacaccaatggcacccaccagaagcaacaggattctgatgctcagcctaatgatgcgccttgagagttatcatcacgtgtagtagcatctaattgtttagctcatgattctagtaggacatcaccatttgtgttagatgaatttactaagcatctttctgtgccaattcgatcagaatctgacatggcaaattgtcgagaccaaactgtctcttacctctattccagttgcttgcagctccattgataatcttaacctcgagtagtttacctcgtattgtgcgtcaaaacgaaaaattaacattataaagatcttattagtctgtctaatatttgagttaaaataaacaaaaatactcagaagctttgcccgtatagcaaaatgaggatatgattatcagttcgattcaaaccaaaagctgcaacagcctatgcggttatctgattgtacatttccttctctttgcgtagaattacatagccccaaaatggcgagaaagcatcagcctctatgtacaccaccaggtaaaacctatttactcgccccagccaagccaaacaaacccaggaaaggaaaggccctacctattagtacaaaaatatccaaaagggagaaataatacagggattacaaaatttctccgctagctcgagaaatagtccccctagctgctttagctgttatttgcacccagctaattgggggcagaacagttagccgtcgggattttgcacatcctggaagctgtcaactctcgtgcaaagcacttggattggaatgatcaactgttgaatgttgctcttccaagaaactgtgtactcgcgtgcggaacttctgggctagttcagcgagatcgttcgccatctggatgttgatctcaccaaggtgtctcaatgggtatttgctcctttgcggcaactgatttgcgacatcaattgtcaaggttgcacagagcttgctgcttgtgagcacttccagtgttggctttgaaaaattagcatgcgaagctagtcggtttagaaggattagaacctctctcattagcaaatacctacagaaaagcatatgttcatcagttacaaataacagagtgcagacaactctaagctaaggtccatggttttatttttctgtatgattcttataatattatttgcatatatatgtatctgacttaaaagtatccagcggtaatttaatataagcatcaaaaggaaattaccaagcagtcacttgacaacatgatgcaattttgtggttatctgcatgggcagcctatctccacttacacgctactacctccatccacaaatattgagggattttgggtatgtaacataaccaaaatcccttgtatttgtggacagagggagaaaaaaggaacatattcaaaattgcagtttaggatgggaagttcaagatcacctttctttcaatagctcatgttctccatttgaaagggctgtgtcatattccatctgtgacgcaaggacttccatgatcaactccaagaaattggcaccacggacagtaactggacctagaagcacttcataccccaatttgccacttgaagctatatatgctaacagagtgacaactacccgacaaagcttgatcccctgaaaataatagttttcttagttgtccagtgttggaagtaaaatgtaacagtagaacttatgtcatcttttgtttctctctagaactccagctttaaaacctttaagaaataccatgcaacacctttttttcaaagaatggcaagtaacaatattactatttttcaatatatgcagtctatgttcttaataatatggaagttagccttcaatctaaacatctaaatgaaaatatacggtctggaagaggagcaacataccagagaacttgttgccctacaactcaagcattcagataggtccttaaaaattgagcttatagcttcttgtgatctatcattttcacatcttatagcttcaatctgctcagggctatctttacctccattgcatagcaacttcaatgtcgttgggcctaccagcaacaggaaatccagatatcggtaaagagagaaaacaaagtaacagaaaggtaaaggttttatcttcaaaatggaaaataaatactctccttcccaaattgatcatcatatagtggaaactaaaatttctcaaattgatcatataaccacatggacacagatttcatcggagtacaatcaatacagcacgggagaatgtgtgcatgctaaagggtgtaattgtgcattgtgttttaatcgatgcatgcattgtgggagaatgtgtgcatattgtgcatgacatcttgattgatgctgtttaaattatccttggtcttggtgcacaaacggatgatcaatttgggatggagggagtatgatttatgaccccaaaacatccagtattccaataggaatagacttgaaaagaaatatatatgttatttcttggagcacatttttttaacaggtatatagactgaacaagatctaattaaatcctggccaagcagccaagctagcaacaagactttgcaaaagggcagaattaagttcgagaagttgcaagggtccagactccagatcaccattttgcattttgcatgcatttaatgcaccagttattgtctgatgaagcgtttctgtagctatattctctaatactttaaatatttgagttggtggtggttgatagtcaataactaaacatgaatcgaattccactgcaatagatgggcacatttcaagctcaccaataaaacagagctatggagaaaaaagagccagtataacaggtattctaccagaggaagtgaagcattcatttagcctttaaaaattcttgaaacgacacattcatttctaaaactaatactaagtatatataagcctgacaacttacaattcaatagcaagaaaagtagatccacagaatgcttcttaacaagcaatccattttccttctgcaacagttgatgcaatttttccattacagaagtaaatccgaatctgaaagtagcagcacattatcattagcgtaaagcattgcaaccgattaaagaaagaaataatactcatgtgattgcttacttttcccgctccactttgggatcacttgtccttgcaatgataatcattatagataatgcatcaacacgaatattctcctccgaatgcctgtccgcaatttgtagcattgcagtgaagagtgaagtccagactgtaaaaggaagctgtgtgttttcagtgtgaagcccatcatggcttcttgatagactcgatgcatcaggtgtattcagcgaagtggagctacctttgtgactgttccgctccatgtgaacagtattgttaacacatggctcaatagaaacattattcctgatgttacactgaggaaaatcgtattaaagttcataagcatgagaacctatcattataaacaaggaaaaaataatgaacaatcgtattattgtatatacccacgttcttgttgtattgctgcctatgtcaaatacttggttgattacaaggcatctacaaaataaaaacccaccccacccaattctctcagaaataacaaatacaatggaacagaaaacaaagacaattcaccgtgctaaatcaatatcaatatctattaatatttctcaacatttatctgatactactttatttctactatgcagtgattgattgctcagcctggatgaagatagcagcccacaaaaattgctcgaagcacagctggtcagttaacaactataccttccaaggcatgcacattgtaagaatcaaactctagttttgccaacaattaggctaactgatttagtgacactaaggtgatactgccagatttgtatttaaatgtactttcattttctcatgattttagaattaaaagatagcattttccaagagagatttatggtcaaagttcaattcaagcaatacaaaactgaactgactggtaggttacagaagagaacattggtaaggtattgaatgcaatagtagctgctattctataagataaggttggctggtcaatatctgagttcagtgacgaatccaattatgaaatacacttccatggtaactagaaccatattcaatgtagtagtaaagcatacctctgattagacatcgttctgttattcagcaagtgctgcaagacactatgtaacatccgcagggctctactaacaacagcatcctgaaaaaaaaacagtaggtaaaaatgataattaagtccaaggaataagagtaattgcctaattggaaaattgactggttcaattcagcatccacaacacacacacacacacactacagaaaaacaaccatgacaatagatcacaaataaaagcctacttcagcttagatagttactgtatgtccaacaaactcaacctaaagttactgtatgtccaacaaactcaacctaaagccatgtaagtttgcatgtgagaagctattgttactagttcttcaaataaatcagcaagctaactgattctcagccggctagatatttccacaagtatatgatgaaacttggtttgaaactgatctgagtaattctgacttccttgcataataggaagcactaaaattgggttgtcccgaatgccgcatctattttttctagacctagtggggaagcccataatcatagacctgagaaatgtactacaaatggtaatgcaatgtaaatgactatataagcatgtaaatgaagttggataatcagttcatacattaccaacagcagccaaatttagcaatgcttcgagaagagtttgtataggtattgtatcactgctcgtctgcagggacaaaacagataatttgacaatgtgaaacattaattcaaataaaatagagtaacatggaatgaaaaactaaaagtaaagtagagaacactctaactacagtatatggagatgaatgcattgtccctattcaatgttgaaatctagtgcagactacagagaagatagtccgttcaagctgaagtttttgccttgattagtaaaagttcaaattccacaaaatagatggtcagttcaagctgaagcagaggaaaattaaaaataaatgtatattttctatctttggcatgtctattacctttatgatgatatcatatacttgggaaatagcatttctgaccgatgagctcgcttcagaagaggcttcacacttgtctagcgatcccgtagactggacaagtgtcaaaatttcttctgagcaagaaaccaggatctttgatatcagactcctccccatcaaactgttagttggcatgccccacactgcacacagattgctagagatacggtcaaccaatactttcttgtgctcaagatattcgttattccctggaagatctgtctgaacccctacagtcttgatttccttgtgtttgctgccttttgattcaaagcgaacactttcctagcaatcacagcagaatagatcactaatggaatatgctagcaccatataatagaaagcaatgtgcccaggcaagacaagctacctccaagacctcagatgcatatgtttgattcctttggttcaaacagagaccgtcttgaggggaactgagctccttgtttctaccatttaatgtctctgctcttctcgtggatgccaagcaagaatccccagtatgcaaagccccatttgcaggggcatgaacagactgatcaatatccatagccatactgccggcatatttgttagcagaacccctgaatacacaaaaagggatgtcaatgatattgagcatgcactcaaatacagtagccatggcacatgtcaattaacggttcaaggagaactatttcatttcaattcaaattgttctcattcagatagcatgcatggctaaatcatgagcgattccaggacatgatgagacaagaccatgggttactaaatacagcactagagtgtcacttacacatttgcccttctcaaactttgaatctctgcttctttagccttgatttcaaggtctttccttgtcctgtctttcttcagctcactgcattcgtttttctgcattcgaaattgaaacaaactcatctctagttgatcataccggttaacttaaatctgcattgatcatttcatctgttcacaacatcacattgtatagtagtcaagtaagttcaaatatcccagcgcccccccccccccaattgtattaggcaagtcctcatttgaaagcagactcaaactagagcaaaatgcactagctctgcgcagcattagagcacaacagaatcatctagtgagatacgcaccacgtcgttcatttgcttcgagacacgattcagctccctctgcagaagcaaacaagtatttcagatcacaagcattaggaggagcacaggcaagcgaagcatccaaacgagcatatgtttacaccgcacgcgccaatgcgccatcgcaaacctcaccttgagcctctcgacctccctccgatcagccgcctccctggcatccctctccctccgcgcgcccccgcccccgccccctctgaagcgatcagcaccggcgatgcccgacgacaccgcgacgatctcgcggctgctcacctccgccgccgggcgctgcgagagctcgcgcggaggggagaagtcacggagcccgacgtcgaatccctgcggatgctgggagagctcgcggggaggcaagaagtgaacaggggcggcggagaagacatggggcccgggggtgatgtaggagagcggaagcgcggcggcggcggcggaggaggaagggtacgatgaggtggagggcggcgggaggtaggagatgaggtcgggaggaggaggagggggagggggagtggggttagggttgcgggaggcgacggcctcgtcctgggcgcggaagagctcggcgaggaacttgtcgtcgtcccactcgtcgtcgaggccgtccatccccctcgcggcgcaccgcgcctcaccggcggcggcggcggcggcggcgcgaggtgagagagagaaagaggggaagtgggagagggtgggtggggtcgatgaagaggacgggagtgcggggttttgggctgcatttaatagctccccaccacctttgacgttggtttctctcatttatccttcggataaaccattcttagtactccctccgtcgtattataaattgtttaatttttttaataaaattttgataagtttaatcaagtttataaaaaaatttaacaatatctaaaatataaaattagttttattaaatcttgcattgaatataatttgataatatgtatgttttgtattgaaattaatagtatattttttcataaatttggtcaaaaacttaaagagaaatttaactaggaaaaagagacaaacaacttataatatgaaattaagggagtgcaaaataacaagaaagttaacaaggtgatgaagggcaattttcctaatgattagataaactcaacgtgaaataattttgaggagaaattttggattttctttctgtgatcgaccttgcaaagcctaacattatttgatgaacacacaatacttatcaaatccaaaagatgaagaggactcgggctccgattgtttgagttacggctgataattcataaaaatatgaatgaagcaatcaaaattaatttatacgcaaaaccttcatatctatgttttatttaaaagctaatgttggaaaataactgataaacccccccccccaaaaaaaaaaaaaatcaactctaaaatttatcaacggaagaggcaagaactgactgagcacatgctctatttatccaatccaaaacaaggcattcagaactactacatgtcactatgtcagaatcagcctatagcacgatcaccattagaatcttttccaatgatcaacagaacgaaaacttctctgtcacttacagagcaagaacaaggtagaataaaaaccgcaccactatatgcctgtaacaacagaagaacctatctgaatcctgaatccagctccatctatcagactagcacaactatagtttcttgtttctgtatgacgaatctgttggtgtatcttatcttctctagctaaccacccatgatctgcctgatggctgcacgctgtgaagatgacagcctcgtcgggaaggtcacatcaaacttgatcttcaggttccccttcttccccggttccttcctgatcggccacccttcgttcgcgagcacaatctcatgcccaggacgcacgacttcctccaccctgatgggaagattcctgccgtcaagggtcttcagatgtatggttgtcccagcaagagcatccacgagagggatcacctgggttgctacaagattgttcccttccaggaggtacacatcgtggggcttcagatcgatgacgaaggtgaggtcttgtggcaactgaccagatagcctatcgcctttgttgggaaatgttatctttgttccctttttccagccgggcaacacttcaacaggtaagacctctgtctcgatttctacctttctgcacaagattagacagtagagaagcaaaatgcttcagtaaacctattatcaggattaatatctcaagctatgcaatgctgcaaagcaagaggaaaaagttttctcattgcatcaattgtgaaagtataaaaagcgaaagtaacaaatcaatacatatccttgcattgcctatgctcttcttggttaaaaacagggaaacttcgacatatgaagctaactcaagaagcgcagaattaaattgtaaagctaggacaccaagtatgctgccagttatggcatggttttatcctccagaaactgttttcctatcaattatcaaaccacattgtgtagtgagcagtaaccaggattatcaagattaagaattaacagaattcgggcaaccattagccatgccaatgccaccaacaaactctttagttgtaacttatctggattccatttttggaattgttagcagatccaaacgaaggtaataacctaatatgcaaccaaaccaacagagtatggagtatggactgctcactgacacaaacgtgtggtgaaaaattgtcaaatataacaaattgttttgtgttcacaagtaactgtaaaatgttgttccatacacaaaataggtgccaggcacaggtgctcaaattcaacaccatataaatacgttggagcataagccttgaatgactaattaattagaacctaaatgcagttacatatttcttacaaaaatactggagttggcttacagtgcaaacagaaacttaacaaagagtgtcaatagcacaactcctaccattttggtatatttcaaaacccataataatgcaattacagaataagacacaatatttgaaacttaaaatttttcttacaacaaaactatgtataagttcacatactttaataaaggaaaaagtacgaattacccccttgaactattgcgatagtatgaattgccccccgaaccacaaaaccagacatattaaacctcaaactattgaaaccggacgaattacccccctgactcaatctggagcggttttggtcctacgtggcatacacgtggcgccgacgtggaaatccaatcagcaaaattaggtggtcccacatgtcatgctgatgtattttcctttcttccactttcccctctccatctcttccagggcagatagaaagcggcgcggcggtggcgctctccaggacggacgggtgaagcggcgacagtggcgactgcgccctccaggccgggtgggggaagcggcggtgtccaggacgggcgggggaagcggcggcgtcaagggcgggcgggcgaagcggcggcggcggcgacctgcgcatgtctttcttcatcttcttgccccttctctctcctgttcatctcctgccaacctgccctgtctcaaatccggccagccgtagctcatggaggagagcagagtagcaggaggtctagtgaagtgggaggatgcagagaagtgattgaggcaggcgtcgtccaaccactactgccgtccaccatggaaagggttacaagcaacagaatggcgacggtcaggaggaaaagaaaacatcggtgaggtcgtaagaaggtcgatggatgcactcgtcagtgctcttgctctgtacatcgctcgttcctgctgtagaagtgttcctcgatggtgaggctgtcagattcgtagctttcgatttgtagagtggctgcgcgcatcaatctctgaacattctttttttgaacgaatctctgaactttcttgatgtgtaatttcttcaatttctgcaagagcgatttctgcaatttcttcagatgtcatgtgtattcgatggttcgattatctgaatttgccaaatgttctcaaccccgcgcttcctcccggacaaatccaactgctagcccaataccaccaccattggtaccaggcgacacgggcaggggaagcggcggcgatgacgacgccctccaggtctagcgggggcagcggccacgacgccctccagggcaggcaggggaagcggcggcggcagcggatctgcgggaccatgccagcgccgagcggcggcgggcgcgccggcagcggtagcgggcgcggcgaggagcggcagcgacagatcgcgctcgtcgacgaccatgagagattccctgccgtcgacacggcctcggcgcacgtcccccggaggtaatgcggacaccggtgaggccagcttcaccaccgtcattccagtcgctcccgtcaccactcgccgcccatccgtgcctatcgccgctcgcccagctacgcccaatgccaacatcacagagaagaaggggttatatgacatgtgggccctatattacttttttttattttttgctgattggatttccacgtcggcgccacgtgtatgccacgtagaaccaaaaccgctccagattgagtcaggggggtaattcgtccggtttcaatagtttgaggtttaatatgtctggttttgtggttcgggggggcaatttatactgtcgcaatagttcaggggggtaattcgtactttttcctttaataaatgtgttcccacattaatgaaactccaatacagtaaaagaaaaagtgcacagtaaagagaaatcgtaggcatacatacccatcagtatttgcaacattcctagtgatcttcatcttcctttttgttccattatacaattcctcaagagtgcacagtaaggttttctcaatagctggtggtttttctagttgacttgtactggtactgctttccttatgtgaagcagaagatgcttcacctctagtgttccctgctgtccactgtgatcgtggttggaaccgcgttcgttcttggtcgaaggagtaaggtttgttgcttgccatgaactcagcaaagaaatcatcagggtcgctcggattgtaccggaaattactaggaccacttgagccagcagctgcggaagtccggctctgtgaaccaggtggaggcattccctttaagccttcttcaccatatcggtcatagattgcacgtttttctggatcacttagtacctacaaaatcagccagagttaattagaaaataagatattgaagtgagtacactacaccatgacccaatattgcatcagaataggttacatcatgcagtattactatgcgtttgacatagttgcaatcagaatacaaatgaacatacacttttccctcacttccgtccgtattttactagttcaaatttcagatcgatgttatgataaactaattataagttagggaaatgaacttatgagatgctggagtagtatagcgctatagcttgctacttttcaactgaagtacatccacacttccacagaattgaaacagtcttcttttgcggtagtactttgtcagccacttgaattgtcaaaagttactcttttcctcatgtttcaaacaagagctggaccaaaggtctcatgttgcaaattaaaaatttatcaagatggatcataagcacagcagtaaataaaagaagggccccttgtaaacatggaatgaatattccaaatgtggtatctgagtacacttggagatccaggttacaacaagcttgagattaaaagctttgtataacacatcatccacccaaagctatggtcacagtcttttagtaccactgaacggtttatctccttagttacactacgaaaaggcaggtattaagataccattttgaggatacaaataaaaggaaggtccatcatatctctactataaatgctcagttgtcctcctatggtcctaaccacgcacgcccaagacaaaccgccccccacaaaaaaccgcccccatagaaaaccaaagaacgctatggacaaccattggtccatagaaaactcaaaccgtaaaatcattggcccatcttctcctagatcccgttaagatgcatgggcatgtccctagtcatcatttattaaaaccgttaacgctccatagccgccttctgacatcaatatggcaccaccatagttgcaccaaatggtaagtagctatgttttcttagcaaacttggggagcataccccaaagcacatcatatcacaaggaaaatggatgcacaaaattcacttgcctcataggcctcagttatctgcttgaacttggcctcagcctccgcgccgccagttggattcttgtcggggtgccacgtcctcgcgagccgccggtatgacttcttgaggtcctctaatgtcgcattgcggttcaccttgaggatattgtagtagtccattcccatccttgctctaacaaactggcaaacaagcaatgaaaacctatactcctagagcttcataaacctaaatccagtggaggcccaacaaattctgacaagaaaggaaaattttatcaatcgacccttccaaaatttactccagcatggctgccgaagaatcgcaacgagagctaccgaatcagtgaaaccgatgtaaaataccgagatgctccaaacccagaatcaatgccgagccggatttatgcggtagcgtcgagaaatcgatgaaatccaccagagccacaccgaattgctcctcctccggatggccctgaaacgcagaatgcgcagacacacacgatgaggcgccttgttaggttacgctgcggtttcgaaatgcacacacgcgattcagccatccaacgcaatcacgcaccaacccaatcgtagatctcacctcgggtttggcggcggcgcggcaggtcgtgcagggtttgggttgggggttggaggggcagaggagcctgcctcgcgccggcgacctccgcctcgatgcgcctcgccgacgccgcggacgcgggatgactcggtggtggtggtgcgacgaggggcgcagaggtgaggtctcccgctccgccgccgccgccgccgcagccgccgtcctcagaccggtttgattacacgtaattaattggtttttttgttttcagatggtttttggtttgtttgagggagcaacaaggtgtttgtgggattctccgtactgatcgctttgtcgcttggaaactgagctttctttctggccctgtggatgttgggaaacttttagttttttttctttttttttctactaggggtgattttgttgtaatctaaaatgtaatgtttatgatgttaaatactatctctgtctgaaaatactcgtcgtttttaagtttttttatagcatttgatcattcgtcttattaattattatttattttgtttgtgacttaagtacgacttatttttttttatatttgtactaatcttttaaataagacaaatggttaaacgttaaaaaaaagtcaagacaacattgaatttgagatggagggagtagtagtagcagcttcttgggatggtagtggtaaatttgttttgtgtgtggtttttaatagagctacagttcgagacacttaatcatatttattttgtagagtaatatgtttaaatacttcctcagaacacaagtttaagaaaatatatgagtatgaaaaacgtatactttaataaaaaaaagtattttatcgaagaattgtaaacacgtaggaataatgattatttagatatatcataggaaaatgtaagaattgggtgtgagaaagaacaactcaaatgaaagttctcctgaggttgtacaccatgctattttttctataaaaaaaagaaatcttcttgtctctagtcactctataaaatattatatgactttcggtgttctggccctttgttcagaggttcgatagaaaaacaaattatataagcttgctatattctaaaatggaggaagtgtgtttttatacaaacgtcaaaggataaaaaaatttattattccatcgtggcttcatcgctaaagtaaaaaaaatctatcattattacttctattagattttgggcatgtttggtagagaatgcagtgttgttacggctacgttgcagccaaacaaggcgcattctctgttgttggcttacagatacatctatgcagttgcaggaaaaggacagctggacatgcccttagtacatttactcttttaaaccatttcaataacaatttcatactctgttctatcaaattattataaactaccttactatattcgtattatgtgagagtatttttcctgttaagtggatgcttcaatgtgatttcaaaatactaatctcgcaaagataaactaggatgcagatgcaagtaaaccatagtttccttgtaccatatatacgtagagttaaaacaacaattcacattgggtgtgttcggaggatattttttacagcgtagtttaaaactgccgaggcttgcagcgactttgaacgacaacgatggctgccttgccaagtcattatacattagagtacaaatactcgatatcgggaactaataaggctaatatatatctatttcacactaaactgactagtaaaagtatttaggttttagattaaactagttctagaagtgtttcaaaccaaacggaggaaagaaaaaccatcaaggcagcaaaaaaaaaaaacattccattctgtattcctgcaaccgtgtgtgcttttttcctgggtctcgtgccagaaaaaccaaactagtactcaagaaaaagaaaaaaaaaacacagagaatacttgcgagctccgatctcttcttcttcttcgtgagctctcaccaaaccaaccccaaccactgccctcctcctgccgcgatccactcctgctctccagctcagggaatccacctccacccgcagagaccaaccagcagctgtccgtcctctgcggcggcggcggcggcggcgagatggggcaagctctgcggcggctcttcgacgccttcttctccaccagggagatgcgggtaccgtgcgatcctcacccacatcctctctcccgcggttctcctttgcttcgtgtgtggttcttggccggaatgggtgattgattcctcctgccgccctgcccctgtggctgggattcttgcctagggttttcttgttgaacttatttattattatacctaggagctgaaatctcgactgtgcaagaaataggttgaattttcagtggtaggtaattaaatcgtgctagtggttaattgggcaacttttgagttcaagtgggtaagagaaatactagcaccctagcagtgtacattggcaatggaagggtttaatttagtcttgccaactcagttaattttgcaaaggatgattatgacatcggcgaatttgttatgtgatcaattttaagagaacggggcttttgccttacaagttcttctaatccacagcacttatgaaattcagaaaatggaccggttactcggcttcttaactaaacctatggcaaccaggatgcatcatctcatcaagtgtatccatagcattaggctccgcatccctgtctatttaacttgtgaagttggagattatttgaatgttacatgtttttcgctgatagtgtgattgacctcttgaaggttgtgatgcttggtttggatgcagctggcaagacaacaattttgtataggctgcacatgggagaagttctttcaacggttcctacagtaggtacgtggctcaagctcaatgactcatctaacgcatcgtttttaatgtacttatttatgtatcgtattaaatgatcgtagattgccatgcagactattgcagtacttgacacttagcttcagcttatatgggcaataaaagtacatgtccgttttttgggtggttgaagggatccatgatatgattttcctgctaagtacagggtcgacactcaacagtcagaaataaaccgaaaaacatgaccgacgatatttggttaatcagtgtacagggcatgcttggcaggcataactgttcttgtggaattgatttggaaactttaagcttacaactgattgtttaaaaaattaattacttcaaatcatgtatatttccaagaaagaaagtgcaatatgatagaagctggaaactggcttgacgtttcttgataaggtattagtttgtagtacctcctggtaccttggcatagaagatactgagaggtgccaaagatttacactaaaaagtatattcttgaggattgtaaaaaaacaaggttataaaagcctatatattgttattttaatgagaagccttgctatgattttggacatcaaacttgatacaataaatatggtcactctatgtgattattagacaaccttatatgtacctttcctctacagtttgggctttgggcagtaaagatggaaaacttatgtaacaaaaatacattgttggatttggtttcctcgttatgtgggtggtacttttttcctttcaaatcacgtatcactcaagacagcttttcctcaatccaattgaggaagtagcacagatttgtttactttttttcagtcgtttataataaattatataattctatacctcataattcattgatgtgctcgactttttcccaatcattgatctcatgtctatatccaataataccatgtaccctctgcaggttttaacgtagagaaggttcagtacaagaatgtggtatttactgtgtgggatgttggcggacaagaaaagctcaggccattatggaagatgtacctcagcaattctgatgcactggtaataactagtagattgaatttatatacacatgttgatatttagcttggcaccttgtcattccgccctgttatagtgcctttagtactttcccaagtcttggtttgatattgtcatgcacatattgtttgttttcagttcaggttgatatcatatattagcaccttttgcaaatttttttcttgtcgttgaatgtgtccctaaagcctttcagtttttaggtgaagtttgtaaatcgatatgaatgacgtaagcgaggagcgtctagtcttctttataaggacatctctttagctaattcgattaggtgtttcatgacaattccaattgctatatgcatcatatgcatatcttttgctgctgaagttaaggatgtctttctgctttcaatttgttgttttttcagatacattattgaagccatacatttctgtcatatttatgaaatttgttgctttcaatttgttgtagatctacgttgttgattcattggacagagaaaggattatagacgccagacaagaatttcaggttagaattatattatctctgtcattgtagtagttcctgtctccccaaattatgttggctgagaatatgggatcctactaacttggtattcctttacccttttcagaccattatcaaggacccactgatggcaaacagcataatcttagtatttgcaaacaaacaggacctggtaagttaaaccaagaatttgaataactaatgattaattgcttgcctgttcatgacctcatttacacaccttttaaaattactgtgtcgcgtgttcattctttttaccagcttgtctgttattatgttcagtatcgtctttgtttatcatgtgcagtcttttttattatatatagatctccttacaaaattctccatttctttttgtatgatgttggttagttcaatttacattatgagatgggggtagtatgactctatctgctacatattggactaaagatctgagttactttcaacaatacacggtgttgatcgtgctgtcagggattttgtactctgatgaggctttagcttagaaatatcaattctttatgttccatattgctaactggaaatcaatgtgtagatctgttccactgttgaagccatacatttccatcagatttatgaaattgtcaaatataagagtggtacttatagactaaaatattatcttcacacagagaggtgcgatgagcccagatgaggtgagcgaggggctaggcctgcacgacctcaggaacaggatatggcatatacaagggacatgcgctctccgtggtgagggactctacgatggacttgattggctcgcatccaccctgaagcaattgcaagagacaggccatgcaacttcagtcgccggcccttccatctgatttcgctagagaaggtattgtctcactttgagtgctgaccttttttttttcctcatgttctctttcttgcacctgacatagttaccacttacactacctgttctgttccccccagagatgccaatgcctcaactagtcaaccaatctgatgctcctgggcagtcatccttctgttcatccaatgagaatattgagttccttggtgcatgcgtgatcttcgctatcggctttcttggtgtggctgctcgcagaggagggcattcaatcgctgtgttcatatgagcaaactcatttgacagtaacttgcggcataattttctcctaaaatgtttgtaaagtgtttggacgtctgtgtactttgttgtagtgaacaagagctgagtagtttgcacggaccgtgcttgtgtatacttgatggcacgtccacatgattgtttgctgattgcctatcaataagacggttggatgatggatgttgtttggtgatatataaactgggctttggctgaatgttcctccttatgattgttcacaagttcagagattgttacgttggtagaagatatgcaaagaaaagaaaagaaaagaaaagagagtgatgtaggtatcctttgcggcatgggcaggaatgttcagaattagttacatttagtaatgttccgcagaaaatatagcatataaaaagaaaagaaaaaaaaaaggagcggtgtagtaggctactagcctttataacatgggtagatgcagtttgagaaatggtagggagaaaaaaaaaacaaaaaaaattgaacgacgcctgagagattcgaactctcgcggggaaaccccatgtacttagcaggcacacgccttaaccactcggccaaagcgtcgttgttgaatgcggatacagtgtagaaacagttataattttttgtcagaacctttcatactccaaaaatacctacgtcagcgttgggacccactgtcatcctcactatttagcggtagtacaactttttgtctgccttggtttcatcggtagccacgtggcttactcgctataggccgaaaggcccacatacgattgggcctcttaggccattcccaacccaatgactaggatagtgtccataatattaaataaactgtcacataaaataaaaaatgatgtgacaagtgaataaatgaggaaagagaaggaaaccatgtcagagacatagtttctacacaacatccaaaacatcatttgagataaatatcattaaatttaagtatgaaatagtggtgtttgcattaaaaaagtagtgtctagtactagtttctttgataatgtggagtttatgaaaactatgtctagtgttttaggttggggatgcccttagtccacggcccacctcgagaccatgcttgtctgcctgaggtttcgtttcattttagggagaagcacagcttcaacagccagacatctccacagaattcagaacaaaaaaatttcatcctagtaaagatttccccttcccttccgtaagttcatttccatcgtgttaataaatcaggttccaagttcaacacatgctaggctacagatgtgtcctagccagtccaccatgccgcaaattgtatttgtacatcaatgcacaacaagtctccccatttttctcctctcccagcacatcacaatgtgctatcagcgtggaatcatcaatggggagatcttggcatttgctatcagtctcagtagcactgctgctgcatcgttcacgtcattgctccttccagatgcggccggtaacccgcagcttgagctcctgcctgttgccgccggagaagaagagggccatgttccggtggatgatgaggccgtcgaagctgtcccggaccttcttgtggctgtccctgatgctccgggggatgccctgccatgtcagcttccgcccgttcccgcccacctccaggctgtagcagaagttccgggcctcgctgtcctcgcccatgaacctcaggaacgccatgtacactggtgccatccccagcaggaatgcctcaaaatgcaggcagaagtgctgtccaaaacacttgaaaacctgcatggcaacagaacataggggaaaacacatcaatatacctgatatagacttaaccgagaaccaataatagctgatttcaaaaaagatggtaatatgatcgcaccccagaatgaaaaaaatatatatatgcagattgcttgttatgcaaattctatcctaaccagcatgacacctatgtttgagaatgaatggctagacaaattctctttacatatctgagaaaaaaaatgcattggggtaccacttaccgtcagcatccatgtagcgttttccacttcataagggttggacttcacataacggtggttaaaggtgcagccttcatgcaagtccaccttatggtcgtttatgagatgagagacaagcatcggaacatcgccagcaatcaggcattctgaacctgcatatggacaactatatggcctgaacctgcagagctcctcatgcttaagtttgttttggtaaggatgaatctcagcacagcctaggctttgatatttgcatggaagctgaagtgactcagccaccttctcaagagccaaacatctgatattacccagttcttggcgacaagtagggcaatgattctccaccctatgcttgcagttagagcatattgtgtgaccatttgggcactgcaagaggaacacaaatgaatcaattgattattacctttcttactttgtgtgttcacttttcagttcacagaagtcgttccaaatatcatgatccaagaaatataacaccagtgctacgaaagttatgcaataacgcctacagttcattcaattcgaatgaaagaccagaggtggaggcatttacaaagttgaattgaatgatcacaacaaacttacacaactcatctggcaaagaaaggtaaaataaagtacaaacagcattatatacacaggtggagggagcttgcatacaagaaaaactaataatcgctttcatgaaaacacagaaaagtcgtgcaactgttgagagtagacaacatgccaatgttaaagaatgcattgctattctttcctggacagagttttttttttatcaaaagggtggtacccctccatttctatgagcagaaatgtgaaagtttcctggacagatgaagtcttgaacattcacagatcactttgaagatcatgaacccagtattgtaaggacagggacaataagcacaaaacaattgagttacatgtgcaatgtaaaacttgtcaatgattagaacatagaaattaaagaacatgcactattatactaacaaacggctgagtttattgtgaaaacaggacaaagcagtcaatacttgtcttcgaatgaaagaacaggtaaacttcaccaacacaacattcaaataacaacaaatccaatgacaacttacatgtcctaacttggtgtatgtgcaacacatataccttgtatacaaaatatattcaaagtaaaatgtcaaaagtggtgggaccagtaaagctttctagactgatcccacttaaatatccaatagagctagatgaaaactagcaactacatttttctcaggatgaaatgtgcaattatgtagatggaaataatcaaataatcagctgcctctgaaggatcataaagagaagaagatatcatcagtacgcaaacctgcagtataggtgggcgcattgagtttgtgcagactggacactcgagcaaatcattcaagcccgtcagcgatgatagctcaactgtgacaagtgatgtagaccagggcttgcatgtagaatctccatcaagcctaatgccagtgagtgcctcagagagcccatcagatacacaatccgactcagggatatcggtcacaatgctgcttcctggggccattgcaaaagcttctttcacattgggaaacactacaaaatatcaccacacccaccactccatccttccttgtaattagctgcattgttcagttagaggtatattagttgagattacggagaaagtactcagtttttacacaaagaaggcagttatacatgacaaaattaagatgctgcacgaatgaattgacaattttcaatttaagagcttcatgaagtctacatcatagttcttcattgcatattaaggtaaaatttactgtctaacctactactaattgctaactgccatcaccaacagcacaatccaactacacacataactctgttcagagcaaaagtacaactaaactcagtcaaataaagaccacctattccggtgaacctgatccacaaaactatatagctatagagcatgaacacattattaatgctatctacttcgtccaatctaacatttggatgcacagaaacaatcaacattctcaagaaacagtagaactgctcacttgctcagttcgtctccccaagcatcttatttctgcttcaagattcactggcttagtgcatagaagttactagaatcctatcagaaatcaaattcactctcaatcaaacaacttgctgccccctcactgtcacccaacctcaaaattgggctcggaattttcccctggaccgcgcaaaattttgcccctctcactccctttacaacaaaaaaaacaagagtcccttttctcccttgaagacttgcatctgcagcatggtcgaatctgcataaacaaacggctctcggcgggatcctaccgttaccagaactggaatctacatcagttcatccctcgaatcaaatccttccaacgaaatgccggttgcacagcagctcgaccaaaccgcgcaaacgcttcctcttttgcatcagatcatctccagtcgtcctcgcagcgtcagctatgaatcgcctcacacacaccaaaaaaaaaaaaaggaaaatccagcgagcggaatcgctccatttcacaccaattactccccccattccccatcaatctcgcccatgcgccaccggatcaccgaaacggcggaacacacacccaccctcctccaaaatcaaccacgaattggcgaattcgaaccgcaatagaacgccctcaaaatccccgtctcgaacaaacggggtgcgaccaattcaaaccaaatcacacaaccaaaaaaatatttaaaaaaacaatctaacacgcgtctccatcgagtacacggaacattccgtcggtccggtcaagccgctcacctggagaccggagacgccgccgccgccgcgaatcggagaggagagagacgacgacgcagacacagtagcagagtggagtagagagagagtactactagtattttttttcttttctttatttttttatttactccttttattattttttattccgcgtttcctcttttggtgtcttcgcggaggcagggggatctggaattttccgccttccacggcggccggcccacctccccacacgcccggtgcacggtggacctaatgggccggtggcccagtggggcccaagagtcaggggtgggtgggtctatggacgcggtgtatggagtggggtgaggaggtgtgtgtgagagagaaagaggccgtggtgggcccgagatggcggtggtccagttgggtcggggtgagacctgtcgggaggtgggcccggataggcggtggcagaggccggaagtccggaacgccatcaagacgttgcatgtatgtacagtacagcttgtctgctttcgtatatagagaaattttaaggtcttaaaaaatgtttcaggaggtatctaaatttttcactgatatttttaatatcttaagctacataaagtctggagttatcaaatttcacactaagcatctcctgataccatttcaaaaatgataaaattaccctagcatatatgtagagcaccatggtcatatcacggacacgatcgacatttcattcgtttttgggcctgttcggtggcattggctgctacagccactgtatctatgtagctatagtggctgcggtagccagccaacaccagctgtattttgtaggggctgcaggggagtggttttttctgcaggggttgaagccgtttccacagctgaacggctgggttgtgaagcacagctcaaacagctgtgaaaacgggctaccgaacatgccctttatctagttagttgagtgtgcaggtaataagttgtacccaaagtctccatcgacaattttggtcattatattatagctcgattatactccaaccaaaattagttatataggaatttcggtcggagtacatcgagttattccagttgcactacgtggtagcctggtagggcttgagacagaggaaatttgacacgtacaaataccgttggcaactgtgccatatttctacgctgtggcatatctccaatccaatactctactctacttgttaataatagacattgtttaatgaatgctgctatacaactcatatataattagagacatataactatagatcaattgaaggagagtatatttatatgcactgcagccgtttataaccgttgatcgaattcggtcatacataaatcaaacacttggatcgtatgcaaagcaatttccattccaaaatttcaagtgtactgggcttaggagacatgcaagcatgggccgtccgttgagcaatgccattgttttatttggaccggaacacaatagcgaccggtgaagtcgtgggccgtatagacattgcatgtacaatatcaatggctagactacaggggctacattagcagttgtccctgtactttgcacatgtcatggtcctatatatacatacagcaccatggtcatataatggagacattttatttattttcaccctaatatgtagagtgtggtagcataagctataaactgaatccccgtcatgatcgagtgccagttgagcttgacatgatattttgcctttctattatactccagtaaacattatgtataaatgccgatcgatgataatatgcatcaaaatcccccaatttcaccatatgctagggcttaggaggcacagggaatatgacatgcacatatacggtaagtagttcttccatcttgtaccattttcgcctcctttattgcccactgcatgcatctctcactcctatgggtactaaacttgtcatcttctcaacgtgtctgaagagtgacacagcttcaatttccagtatactgtttatctttctttgtgtttaattgagggatcatttgcgaggaagacatgcatgtgagaaagggtttttcggctagctccacaagctgagttagccggtctggattcgaagtctcaccccttctaagagttagggttactactattttatcagttcacttaatttttgctaaaaagaaaaggatctgacaagcacaagcctcatgcatcatgcaatttatctagtactctgaccgtacaaaacataaggaattttagatgatagaacataccacagtactacgaatatggacagataatatatctagattataatgataggatgtgttctatccatccaaaatttcttatattttaggagtacagagtactatcgctgtctcttcacaaaatttaagaccaaagagaggcatgcagttgatcaaatttaactaccaactacctactgctagctcataaacacaccacacatatatatgtagatacattgagagagagatcatcgagatggacgttacagtagatcgttggaggtgcaaacaagcagtgagaccggccaccactgcacatacatacatgggtcggcactaacacacaagttcaggcactttccatgtaatcttggtaggcttcggaggcatcaggaatcgatgatgcgtgaaattatgtcgttggggttagagcctacgctcgatcgtcgctgatagtttgaacatatgcacgaacatcaacgataacagaatccctacctagtcttgatggaccattagaaaatgacgttgaattaccgtgtgatacttcctctatctaaggcgtgcatatattccaagattcaactttaaaaacatttgaccaacaattattataatataatataaattttatttgctaaaattaatatcattggattgaaatttaaatttactttaagatggttataattttatttcaataaaccttatacttatagtatatgatattgtaaattataagtcaaagattagttttgaaaactgtgccaagtttgatcatgccttatattacaaataaaccttaatagtatattaattcttccttagcctccgtggtcgtgtgtccccgagcattagaggccggcgtgctgccttttgatttcccgttcaagctagccagatgaccggctgcagcgtatgtgttagttgatattgtgaaatcagtgaccatcttatttactcagatcatgtttgcgagttgagaagggcgaactgatggttaattaggaaatgttactactttttctttaaaaaaatacttctgaatttttcttaaaatcgttgatgatcgtgggcactctctggccaggttgcgtggatcaatgatgatcgtgacagtgttcatcggtgtgtagtgacagcacattttggaccctacatgcaaatcaatatattgactgaattttacagtttttcttaattttttgttgaatttgatcaaagtttattcaaatccaatcaatacctgttaaaatttttataaaatttcagtccgaaaagtgccgacaataacagaatttcgtaaattttggtcctaccgaaagcaccgaaatcgaaagggcaaaccctcatagtgagtagtgactggtgagatccttggggacggccgggtgtgccaacagctgcggatcatttcagtgttcatcagttatgtccattaattgcctgtatcttgaaccacatatcaaggaaacaaaaaagagagagaagagcagctaactatagatttgtagccagctacagtataaagtgctagacgtaatgtgtgtatggcatgtgggacaagatatcaatagtatagtatatgtttataggtaactattgtatgtattggctattaaattgattatagatgatttgcagctattaattactccctccgtattcgtaaaggaagttgttttggacagcgacacggtctcaaaaacacaaatttgacttcttgtttctataaaaatatttattggaaagtgatatatgtatacttttatgaaagtatttttcaagacaaatctattcatttaaattttatattttcaaactcaacaacttaagagttactcatgatttatattctcaagatttgacttaaacattgttctaaacgacttcctttatgagtacggagggagtagctctactattaaacttgctctaaacccgccgtgtgttgtgctcgccacgaggcgccgatgctgagggtcacagtgccacgccgcgccgccaacgccggctggtttgatgattcgatcccatggcaaaccctaccacgtgagtgctagccagcttagggggaatgcacgcacgtactctctccgtcccaaaaaaaaaaccaacctcgtattaggatgtgacataaccggtacaatgaatctggacatactctatgtacatattcgttgtaccagaatatatcacatcctagtattaggttgtcttttttgagacggaggaagtatgtgcctttccggtgggctgtgcagtgactgggttggtgccttttgggcttttagtttggcgaggaaccgtaatgttttgacccattgatacatactactaccatgccttcttcaccggccgtctagcgtgtcatgatgacacatagacacagacacccataaacacgcgcgtacacacccacctcatgataagtacgaagtaactccctttaatatgctttttatgatcttgacaaaattaaagaaacgaaacggtctttttaattgctcccaactagtgcaagtacacgttgattgttgcttgaccataaaagcaacagagagagagagagagagagagagagtcatcaatcggtaatactacaagatggatgcaagcaagtgcgtgtgtcgatctagttagccatggaagacagcaggaaccagttagttgtagaaatatgaggtcgtctgtagcagctgagcgtagccactgtatggtgtgtgcgctgacttgcagccaaattccaagcggtggtgccatcttcactggaggcgcagctgcaaaatcttggtcatcataggcgctatgcaacggctgcacaatggattaatacgggagggggttcattaatttttccccgtgcacatcaaatgtgtactaggtgttcttaattttctcctataatggacttctgcgtacacattagccgtcaagccagcaatttgttggtcttggttgtatcccttccttgcaaattgagtgggactcgatccatatgcatatgagaattttattttaagtacatattgattgttaattggtttctagttgctatgtacacagtcgtatgtcaaggtttgcactttcgattttggcgaaaatttcagtaatttcagcgggaccacaatttacgaaatttcatgattttaagcacttttcatttgtttgaaattttaatagattttgactgaatttgaataatctttgaccaatttcaacataaaattaagaacatctaaaaattccggtcgatatattgacttgtcggtggggttcgaaattaccgaaattgcaatcacaatgtaagtaccttcgcttgggaaagtactatgttttggaagttcttcgacatatatatactatatattgtctcactcatcatgtatgcatgtttccgttttaatcttcttcctcaaaagattaaagttggatttaactactcccaacaagtacccactgctaggtgtacatcctcataataaacacatcaactagtcatagttgaaatattcagtgccacatctagacacacgcacgaagagctgatcacaattgatcgagacatgttttgacttttgaggtttcaaaaatcaattaaacaaacacagcaaggccctctatatctgccatatgaatgtgtgcactgttggttgatgctatatctaccaagtacaagctagtttgctgtcaagctatagctgcttgcattgcgtatgtttgggtatataactatgggcccgtttagttctccaaatttttttcctaaaaacatcacatcaaatctttagacatatgtatgaagcattaaatatagataaaaagaaaaactaattgcacagttatgggggaaatcgcgagacgaatcttttaagtctaattagtccgtgattaaccataagtgctatattaacccacatgtgctaatgacggcttaattagtctcaaaagattcgtctcacggtttccagacaagttctgaaattagttttttcattcgtatccggaaacccctttcgacatccggtcaaacgttcgatgtgacactcaaaaattttctttttcccgactaaacacaccctatacctatctaggcttgggggggcaacaggaacatttgtgacaagaggtcaactcaaaaaggatagcgcccacttgcaaccgatgctgtgcacacgttcctaatagcgaggagttgttggtgtacacaggtaccggtcacatctctactctcttcatgatgtgccaacgggcagctacgataagtgcgttgtcccagctcttcatcttgatgtttactactatcatattccgatgtaatgagcatgataatcatcagcattgcacacttttttttggacgatcggagtacgcatactgatatcttgtattcattgtggaacaagcacgtcaacacctagttgtgaacccaaagcaaaattaactagaattctaacatattaggctgcccccctttgaaacggaggacttttaaagttatttttgaaggatttaatttcgtaaggaatttttggtatggaatcctttgatccataggaaaggatcataattttccatgttacattcctatggctcgattttgtagaaaaataagcaaaagttaaattttgttggaaactttcatttgctttgggttttccttcttacgatggtatatcaaagagttcctcttcttcttttgtgtgtttttctttcccgtggaattagagaagcagttgggcccgaataagagatgcagctggaatgcataagtggaaggcagataaagactactactaaatacgggaaacgaatttttgtccctcgcatggcattttaataagtcatcatttttttttagaaaaatagcaagatagatcgatatataatatatcacttcataaacatgcaagtacgaattcagtttatacaattaaaaataaaaacaacaaatttggctctgaattacccattctacttagagtcaaatatgtttttctacctttataatttgaatttgaactgcatgcatgtttgtgaagtggcatatcatatattgatccatctcttacaaaattttattcaaatctttcgatatttttcgagcaacatgtaaaatcgaggcaacatcccctccaggaatgaaatagatcgggtttccccgaaagatgttgcgatatcaatgggtacaggaacatatatatgtcattctcttatatatacaacacaccatatggtcatataacggacatactttattcatttctgcctcatcgatcatgcatagtgtaacacggaagatacaagcacacattgtgaattttgtgtacctgcgtgattcactctttagaaaatttaagacagccattcatttaatttaactggtcccagctagccaagccaactagctagctcacaaacacattatggccttgtttagttccaaagtttttctttaaactttcaactttttcattacatcaaaactttcctacacacataaatttttaacttttccaactttaattttcaatttcaactaaacttttaattttgatgtgaactaaacacgtacgtagcgagagatatatatcaacgatcaatggagttggatggatgctggattgttggggaggtgcaaaaaatgcaaaataaacaataataagactgatcaagtaggtacaataaacagtaaactaaggcattgtccatctagctatagctagggtatactccctccgtccaaaaaaaaagacaaatgctggtttccgtgtccaacgtttgaccgtccgtcttatttgaaaaaaaattataaaaataattaaaaagataagtcgcgcataaagtattaatcatgttttatcatctaacaacaataaaaatattaattatagaaaaatttcatataagatgatagtcaaacgttggcacgggaactcacggtttgacttttttttttggacggtgggagtatgcttggaaggcatcaggaatgtgtgatgcacgtacaaaagctgaccactgacggtcacacaatgtcgacccaagcgtgacggatgtgcagatcacggtggtctttgtgtacttgcacatgagagccctggctgatcataagttgttttatattataagtttgacttttttactagtcaaactttattaaatttaactaatttatagaaaaatttagtaatatctaaaatattaaattagttttattaaatctaatattaaatatattttgataatatgtttgtttttattgaaaatactactatatttttttataaattcgatcaaattttaaaatgtttgactaagaaaaaagattaaatgatttgtaatatgaaacggagtgagtaatgcttatcttctcgcatgacagacggctaatctgatgactagttagtttccttctcttgccggctgctttcctaatttctttataaaaaaaaagactatgcacgcgatgacctctctatcttagggctgtatccaaaccatgcacgcgacactatggaattaattgatgtctcacccacatgtgtgctatcgttttagtttagaccataagaaacctacatcagcagactgactgtagtgatctacacatcaaacttataatcactacacatcaaacctatatgtaggtgaaagagagtggaagacagaagaaagaagcactggcaaactttcttaacgtttgcctaattaatctgttattagcgaatgtgggttactgtaacacttatgactaatcatagtctaattagatttaaaagattcgtcttgtaatttctctctaattatacaattgattttttaatttatctatatttaatactctatgcatgtatccaaagattcaatgtgatgtttttgagaaagttttctaggaactaaacaaggcctaattgagattggaaaaattaaaaggtgtgtgtgtatgggagacgtgcacagataagcatgcaactagctacatactatgtagaaaggtgatatgttggctactccctccatcaaaaaaaaaaacctgggtttccgtgtccaacgtttgactctccgttttatatgatttatttttataattagtattttcattgttgttagatgataaaacatgattaatactttatgtgtgacttgtcttttttaatttttttcacatttttttaaataagatgaacggtcaaacgttggacacggaaatccatgagtttttgttttgggacggagggagtatttctgaagccaatagctaaaatggactattagccttactctaattaacgaggtagtgcatatataacatatttttgggaagaatcaaatgaagaggttagctgaccggtcatacacatgtagtacattgcttgctgctgacctctacaaatacaagttatatactcgtagtatcctaatacgtattgttgtgctagtacacaacatctagctagctgtatgcatgaatgcaaagctaatgctgaggcacatctcggcctagatccatccatccatcgattccatatctcggcctgggaggcattgggaagcgttgatgcacgaaggctagtctctgaggttggcgtctgccggttgccgccgctgtaaactctgccgtggcgccgcgggccgaagcaggccttgcggtttgcaatgctgacagcgtacgcctctaaccgatcgatgtgcctactggcatgtacagtggacacaaggggcctgttcgttgtgcctacagctgccaccatatatcttcattgtattttactgtagcagctggttatcaactactccctccctccgtcccataatataagggaatataagtgattttaagtttttgcttgtgctttttgaccactcattttattcaaaaaaaatagaattattattattttttgacttaccttattatccaaaatactttaaacacaacttttcattttttatatttgcataaattttttgaataagacgagtggtcaaacagtacaagcattccttatattatgggacggagggagtagcagcatcgaacacacccaaggacaatacgtgaaactggatttggagttctggagttagacacagctgattcggtgccctgctttgtgtacccgcctgatcgctcgcaaagatagggttcacagatcgataaagatgaaacttgacaatttgctggacaatttgccaacattccttctctaatgaaatgcatatgtttccctttttatcttagcctttcagtaattattctcttgatggatagagaaacaaattctgtaaaataatgcgaaaatgtatatatatgtaattagtagcactgactaccggttaaataattaattaaatcttacacggagcctcggttggtatatatatgtatatgttcttgtcatcgccgtcttgcttttggctgctgtcataaaaaagctaactctcgataattaatttatgtccaaacatcttcttcagaaaattaagttaaaaccgaaaggagctgcaaattcaattgattttttatatactccttccatccaaaagtctgaaaactattttttttcaccaaaaccaaagagcaatgtgataaaaccaatggacatacaactaataagtactaagatgacttcttggattccgatcaacaatttaatttagcacatgataattacaaataggacttagacttttaaaaaaacaaaaaatataatatatcttaaacttttggagtgagctagagagtactattgactacttcttccgtcctaaaaaaaactcaacttctggagtttgaattttgtcaaaaaaaaaaccaaattttatccttcaataccctttacctacctatcaccattatacttttttcaataatgatgggcattttgatcattttcactctttactaattttgcattgggatgttatggttggattttggattttatatgggacgtacagagggagtactcagcaaccaacgcatccagtcattagactcattaccatatgttcataaatgcatatagacgacataaagagcaaagatcgagctgatcaatcaatcaatccgaggtgtgtgttggggtgccaaaaatcaaacatgaagagcaagcaaggcctccgaaggccatgcctcgtccttttaccaagttagctatagtgcccggccgtcagctgctggctatccgggcccttatcagagcaggtacaatatagcagactattagccaactataaacatattttaataagataaaaaataagagagaagagcagcgggctacagatctgtagccagctgcagcacggactctaagacgtaatgtgtgtatgataggtgagaccatacactaatagtataataagaaattattgtatgaattggctattagattggctacggatgaattggagttagtagtgggctatactattaaacttgctcttagctactcccccgtccctaaatatttgacgtcgttgacttttttaaatatgtttgatcgttcgtcttattcaaaaacttttgtgaatactattcaaaaacttaagtagtactagtatatttaacaatgaatcaaatgataggaaaagaactaataattacttaaattttttgaatagagtaaattttagaaaactgtaactttgtgacaaaactatcagtttgttgcaacaatagcgtgagaaattcataaaactgtaacttttacgttatatgctgctacagtacatataggtgacaactgtagtagcgtatgacataaaagttgcaattttatgataattttccacactattgtcgcaacaaactgaaacatatcgctaatgttgtagcaaactgatagttttgtcactaaagttgcagttttctaaaatttactcatttgaataagacgaacggttaaacatgtttataaaaagtcaacgtcatcaaatatttagagaccgagggagtacttccattgacacatagtatatgcattgttaggataactctacctatatatctagccagggtcttacccttgccatacatgcgcgacagtcccggcagttgatgtgcatgcccttcccctccactactacagcacatatcacatgggtgccgctcctatgagtagtaacggttgaattaaacctagcactgataagggcaacctcaatgttgggttgctgaatgagcgataggggtgggcccatgtgtagatagctttagctatatctatctctacaatggttatggccttggatgagaaacaagccgggtcccactgggttccatcaaagaagaaacataccaccaattcacaaccatatgctgataggttccattatatatcattttttaatctcttaagttcaactataagcttagagctgtttttaagcatttaatgccttatgtccatgtccacaatgtatatagctgaaaaaaagtcttaaggctcacttttatggtcacattgtggatgccctaagggtttcgtgcccctcaaactctcgtacacgtcctaaaaatgcatagcattgaacgatggaacaaacattagtgccggatggagagcaaaaccggcaccaaacaacatgagccgaccagcgagccgagaaaaaaaaagtctagaataactctggaccactctttccttcgatcccaagtctcaaatatccatccattctcccccctcaccctgtctcctcgctctccccgtttattcctttttgtctttctgcgatgccaccgcacctccgagctgtagcttctttctcttctatttttatttttggtgatgtggacaaatctcatgtatccatttttggatccaacactagtttttaatttttcactatatatatatgtagcttgcactacatattttccctcggtttgaaaatgactattttggacgttcttctactcctatatactatatgttgtctcactaattgtgtatgcatgtttccgttttaattttcttcacaaaattaaagttggttctaactactcccaacaagtactcactggtaggtgtcctcataataaacaaatcgactactcctagtcctagttgtgatatatattcagtaccacatctagacaagaaagcagagatcgagctgatcacaatcgagacgaatgttggggtttcaaaaatcaaacagtacacacagcaaggccatccatcattgcaagcattgtgggttactgttctaccaagtaaatctagcgttctagctagctactcacattgctcatctctgggtaactagctaccaatctaggcttgagaggcaccaggaatgtttgatgcacgatatcaacttaagaaagatacactacaacaagaacccccctctagcaatacatgcttggcaacgcattaagcatgcgttgccaaaatgcgaccctagcaacgcttagcagtgggtgagcccaatttgcaatagataatatgtgttgcagaacatgcgttgcagagattgagtatcttgcaacgaccgaatccactttacaacagatatcatgcgttgcaatggtcttgatgccctgtaaaaacttttggaataagcgaacttattgtattttttaaaataatcgagtgagatatttatttttcatttcggacctctagcgaactgttttttaaaagaaattatcaagtgagttgcttttttttcctgttaaaacttttggactaagcatgctttttaaaaaataataataactgagcgagctgctgatacctgatatgaataaattaggggggcaaagatgcaaacagaggattcgaacctgggtctcaaggatagaatgtgcgcaacccaaccaactgagctaatcacatttcttattaaatgatttctttagatgtttatatcataacaactaaaatacgatctgtgaaattagcactttagcaggcaaccttagtctcccactttctctcctctcctctcctctcgtgtctctcacctcacccaacacgcacgagagcgccgccccatcctgttcccacaccgcatctcattttcttctcacgcactcgcacatcactgccacggcgcacaccgacggccagcggcgcgttctcagcagcggcggcggcgagcccgcgaggggatcggccgcggcaggccggcgacgggccgaggctgacgacagcgggtcaacggcaagcacggtccttttcttagccacttctcataggttgattccccatttggccccaaatccaggtcagtgtcagatccaggtcaatgtcaactttttttaattattcaggtttgttgcatcatgagtctatctgattgagtttaataacacctgcagatttttcttgttcatccgaacggatatttggaacataggttttaaacgcatgtgcttctagagtcatcatctgtagattaactagaggtaatttatagtaaggaatttaacttggagatgacagctttgacattagattgctggatgttttttctgtaaattgatttaactcttctctatttttgcagagtaaaagcttttgtttcagtgtataaaggaggtctattaggttgtgacaaaattagctgacactgattttatactggtatttttctaattgccctatttttgctacatcatgatcataagagacaattccttgtcattgttattatctacaagaacctgaaatatcaaatttttttatataggtcgaaatggatttagaaaccatcaagattcttttgcgctaccctagaggttctgttgagtacttagctggagtagatggatttcttgaatttgcatataaagataagttagaggatacaaagatttattgtccatgtgaaacatgcgtacatactatgctactttcaaaaaatgatgtctatgatcatttggtgtgcaatggaatgcttcagagttataaccaatgggattttcatggtgagtcttcagaggagcaaattaggaaccaacaaccacagcctcacaatgaagacatgcgtgctaacatgcacgaattaattaatgactcacttaggactgtgtatgacgacatgcctatgagtgattctgcagattcgccatgtacacacactgatggaccaaatttagaagctcaagcattttatgagttggtgaaagattcaaagaagcctttatgggatggatgtgaactatcacacttatctctgctagtgcttttgttcaatatgaaatccatgaacaaatggagtgataaatcatttggagatctacttgatattcttcacatggcaattccaaatggaaaagaattgccaaaaaacttttatgaggctaagaaggtggtttcaaaatttggtctagattatcaacaaattcatgcatgtcccaataactgtcagctgttttggaaagagaaggttaatgatgatttttgttcaacttgtaaggcttctagatggaaagataaaaaaccagaaaccaagttaacgaagaaagaaagaaagaaagcaacaccaatcaaagtcttacgatattttccaataaaggagaggctgaaaagattgttcatgtgtagagaaacagcatcgctcccacgttggcatgatgaagagcgcttagtagaggatggtgtgcttcgacatccagctgattctccggcatggaagaactttgataaaagattcaagcaatttgcatctgattctcgtaatatacgatttgggttagctacagatgggtttaacccatatggtatgttgagctctacctatagttgctggccagttgttttagtaatatataatcttccaccatggctctgcatgaaggaacctaatcttctaatgccattaataattcctgggcccaaaagtcctggagataacattcatgttttcctctagccgcttctagaagatttaagagacatatttgccaatggcatttccacatatgatgcatttagaaatgaaacttttaatttgagggtagctgtactgtggactataaatgacttgccagctttaggaatgcttgcttcacatatggtgcatggagaatttgcatgcccgccttgtggtccaaatgtatggtccaaacgtttggcacatgggaagaaatcttgttttatgggtcattgtcgatttttgccacctaatcatgaatttcgttttgatagaaattctttggatggaaccacagagattagtacagagcctatgacttactatgggcgtctggtattggatgaaataaattctatcggtgattttaagaagtcaaaaacttataaggcagtaagtagtttattcacactaccttactaggatgtcaatcttcttcggcataatcttgatgtgatgcaatatttatggtacacttctaaatttagaatgaaagtcaaaggataatctccaagctcatcttgatctcaaggaaatgaacattagaggggagctccatccacaacaaagaacttcaagcaagttctacttaccacctgccagctttactatgtccaaaagtgagaagcaattgttctgtaaagttcttagggatataaaagttcctgatggctattcttcaaacatatctagatgtgtgaactctgctgaaggaaaaattcatgggctcaaaacacatgattgccatgttctaatgcaacaattgatgccaattgctttgaggggtattcttcccaatgaagtcacatctgtcttgtttgacttatctgcttactttcgaggaatatgttcaaaagttctccatgttgatgagcttgaccgtttggaagaagcaaaaatcacattgtgtagaatggaaatgatatttcctcctagattcttcactgttatggttcacttagtcgtccatttagctactgaatgtaagattgctgggccagtttgctatcgatggatgtactttattgaaaggtactaaaaatatattagcatacaatttataatatttctcatatgtcatatgatacaatactaacttattagttttgtgccttgtatgtatattacaggtacctaggtaaattgaagtcgtaatgttcgcaacaaagcgcgtccagaaggttcaattgcataatcatatttggcagatgagtgcatggcattttgttcgcgatacttggaaggtttccctaccaagcataacataccatcaaggaataatgacaaaccagatcaatttgagactcccatgagtaggcaagaatccactttgtttcctccagtaggaaaaccattgggaaaaccatcggcgtactccttaactgatagagagaaattgcaagcacatagatatgtgctatacaactgtgatgctgtagtgccatatctaaagtacgtattgtcctaacatagccttttttttatgtgttgtaagtgttttgcttcaaatttatgtttatttgttttgcagagaacatgctgctaatttgcaaaggaagaaacgcaaaaggctaactccaaaaaacattgagaacatgcaaaatgaacaattccctgattggttcagagatcatgtaagtctcaaaatttaggtttctctttttcaaatatgagtacaactaatacatcttttggtttggtgtagatcttgcagttggagaatcaaagaggtatcgatagtattgatgaggatattagatggctggcacgtggaccaattgaggtagcaaaatgacatagagcattcaatacccgtgggtataggttcatatcaaagcgttatgacagggtgactcaaaacagtggaattgttgtgactgcaaaaacatcgagctacacgtccgccagtgatactaaccctgtccttggtgatatcatgtattacggaaggatacttgatataattgagttagactactacggaaatttctcagttgtgttgtttaaatgtgaatgggtcgatgtaactaaaggaaaaggagtgaaaatagatatgtttggctgcacacttgtgaatttctcaaataaattcataccggtgaaaagattgagcatgagccctttgtatttgcaaatcaagtcgaccaagtgttttacattgaagaccatttaaatccagggtggtctattgtaaggaagatgaaacctagagatgtatttgaactgggcgaagaatggaatgatgtggaatgcgaaccataccatgtcaataatcttggggagctatttgacagtgcacatgatggtcagacatggattcgaagagatatagaaggaacaactgtcaataacatagtaactaattaaaggtgaggttatgaaggtttttcactatctatctgtccattatcaatgatttccttatattgtttatatcttcacttggggagcactttatttttatggcagtaattttggatggagatttactgcgatgaaggcttcttcaccacaatagcttttctggacgaaaatgtcattcgtatatttccttggattgtctaagtgattgagccagatcgattcaactttttatttgcatacataagtcctgtaataatgttctacattagttatatacagaattggtggttagatcttatttttaaatatctaggatatcatattgtttatatgatgagaaaaaggaatgggcgtttataatctttgcatctattgtgttctgttataccatttccacctatataaatacctggagaaaactatttacgttgtgaatggaaactatttacgttgtcaatggcacctaacgtgaataagtaagtcgaacggacaactcctacatgaagtggacatagcctggtggtacatggcttcttcagccgtatcgaagactgtagttcaaatcctaacaaatgcgtttttttccatttcttctccagtggcgattcttaaaattttttccctctccttagctggctagataacgaggaaaacaaatatgccagcctagattttttttattttttttctaggggcgattcctaattttttttccctatccttcttagctggccagataacgagaatttttgaactttttatttttaattttaaaattaaactgatcgaaaacttattttttcaatataaatatttttggccacactaactattattttatgacaaaatatgttacgtctggatttgatcatgcgatcagtcagtatggtatggaccgagacgacaacgaaaaaacatatggtttttcggttgtgctaacataaattaaataacaattatttaaagaaaaattattttacatcatgattttatacggcttgtccagaccaggtcgacaacgaaaaaacaagtggtttatcagttttgcaaacataatttaaataactattattttattattttatgaccaaaaatattttacgtctcaatttcatgcggtctgtccagactgggtcgacaacgaaatagcatatgccttttcggtcgtgctaacagaatttaaatttccatcttatataaatacctcgagaagtctatttacattctcaattgcagctaacgtgaaaaaataaataaagggggacatagcctagtggtacttagcttcttctactgtattgacaactctagttcgagaactagcaaatgcataatcttttcatttttctctagtgtcaattcctaaaaactttttcctctccttgaacgggaaaaaaaattctgttgccccagaaattttttaattttttgaacttttttattttaaaattttaaaaataaaccattcaaaaacttattttaagaatatccggatttcatccagtctgtccggaccgggtcgacaacgaaaaaacacgtgtttttgtcgtgctatgataaattaactaactactattttaagacaaaaaaatattttacgtacagatttcatacggtctgtcggatcgtgtcgacaatgaaaaaacacgtggtttttgttgtctaaaaaattaaaccactgttatttaattatatatatttttcatgtggtctatccggaacgggtcgacaatgaaataacacgtgatttttttggtcgtgctaacattttttaaataactatattttaagaccaaaaatatattgcatctcttttccatgcggtttgtccggaccgggtcgacaatgaaataacacatgaattttttgtcgtgctaacatttttaattaactatattttaagacctaaaatatattatgccactttttcatgcagtctatccggaccaggtcgacaacggaaaaacacgtgtcttttcggacgttctaatataaattaaataagtactattttaagacaaaaatatgttacgtccgaatttcatcccgtatgttcggaccgggtcaacaattttttttggtcgttataaattaactaactactattttaacacaaattttacgtccagatttcatatggtctgtccggaccgggtcgataacgaaaaaacacgtggtatttttgtcctaaaatattaaatcactgttatttaattttatatatatatatatatatatatatatatatatatatatatatatatatatatatatattcatgcggtctgtccggaccgggtcgacaacgaaaaacacgtgtttttttatcgtgctaacattttttaaataactatattttaggaccaaaaatatattacatgtctttttcatgcggtctgtccggaccggattggcaatggaaaaacacgtgtcttttcagtcgtgcttagataaattaaataactaaccaaaatatgttacgtccgaatttcatccagtctgtccggaccgggccgacaatgaaaaaacacttgttttttggtcgtgctaaaaaaattaaatcactgttatttaattatatataatttttcatgcggtctgtccggacaagatcgacaatgaaataaaatgtgattttttgattgtgctaatataatttaaataactagtttgacggacaaatcaaccccaaatcgatctgaatttagcaatttatgcctctccgaaaattattttcttctccctccactctttccctccttttttttttgctcccgcaatttttttctgttttcttttttttgccgccaactttttttttgcccccaccttccccatcgagaaaagcaagccaactgcccctaaaaatctctttcctctatcctgactccctgagtaaatctctttcctctgttgtgggattcccctttcctacgaactctcccgtcgttctacggttctcctcctcgtcttcatcggtgttgatctgtaggtaagatgccgggcactttactgacccaccgccccaagcaggcgctcctagatcttccaccgctccgctccgtcggctgctgtaccagccatcactgctgtcgcaccttcctgccgattaacagccacgagcaggcgacccccatgccccatggatgatgtagggcatgcggcgggccggagacgcccccagccgatgtgccgggtgaccggggcactgcaattgatgcgggttatacctcccgacaccggctgtccacttcgctctgctccacgccgcgcggctagcggcaatgtttccaagccctggaatctctgcctccctctgcacatcttactacctctctgagtcgccaaattgcaatggaggctaattcccttccagtactacaatacttaccaatttgatatgttgtattttcaggtttggagtcagatgcactgaccgtccatagctgaaggagcctggtctacgtacagctaggcttcacacaactgtaagcaataaatatgtgatctagttttaccttgcagccaattaaattttgttatttctacccattacttgtttcaaattgttggcctataaaatggacaaatgaattagtgagtatgacaaacagatccatattatagcattacttttgggacaacagtactctgttgttcttcaaaaacaaatccaaaatggctcagggtataatcaattctgaaattattctttttgaaactatgtacagcacagtcctacttctgaaatgagaatgatatactttcgacgccataaatgacagataggttttttttgggtgcaagagatatggcaaggagtagaagaaggcgtattgttcagagcaatgaggaatatttgtcagaggaacagactgaagaagaaaatacccttccacagcttgccacaccatctgaacaaaaaactgtatgtgatgattctggagaaggcaatgaagacactgatgacgattttgatatcaatgatggagaaggcaatgaagacactaatgacgatgttgatattgatgatgaaggcaatgaagatactgatgttgatattaatgttcgaggcaactgctaagtttaatagtcctaatggtaagaaataatgacattattactcgtatccctgattactaaggatcacttttgtcttcgcaatttaacaccgaacagttgaaaatggagcacctgaaacacgtggcaagacaaaactgaaagatgtttggaaccttccgaaagggcttagaattgtggtacaatgcaatgatctcaatcaggcggtaggggaagaagctggagttttgggtaaatttcttggaatgatagctaggaatggtagtctgtgtagcttaggctacacagactggagatatgtaataggaaagagagagaaaaatacaaatgaactaaaagttaaaaaggacatacttaagcaagtaaaggtaattccttttcagatcaacatttttgctaacttcttgtattatgttatgcatatccccatatggccatatgagtttctgtgttgctatatgtagatgagattcctttatgctcctcggatggaagagttcatattaaaaaaaattggagaaagatggcggcaatataaagcaaaactaaaagatttgtattttgatgtgaatgagactaaggaagctaattgcaacaatgtcccagaaggtgtgctttctgaccagtggattgctcttgtcaatcattggatgaacgagaaatcgaaggtacatataccatattcatttctgtaatggtcttacaaattagaactctgtactaaacaaaacaatgcaatattcttttttgattgctaactctacgagaccataacagagaataagtgagcagaataagaaaaactgccaaaagaagaaggcaattcacacagcagggacaaagagttttgctcgcacaagagaagagatggtaaaacatgtcttgaatagtattcatctatttccatttcaagcatgtatagctactattaggactttactgatttggtcatgtgttccatagagacaaaaagatcctgcaaagaagtacccacatagagctgttgtttatgtccacacacacaagcgcaaaagtgacaagaatataaatgggcatgtggtatactattaacactcaaccatagatatttttcagttattctcatatgttgttttattcgtattaatttttcatatgtttaggataatttgaagagacttatagctgaacaaccagctttagcggatgctagtaaaggaaagactgcttggaaaggagatgcattgaaccaaatactaggagatgacaagcctgggcgtgtgcatggtcttggactagttccaaagcctaaacaagtgcttgatgtgccaacttcccgacgtttgcagaatataaatcttactacagtggaggataactccagtgaagatgtaatggctattagactgcagatggaaaagttagaacgccatgttgagaataatgatgctgaacttttacaattaaaagagaaggcaaccaagttggaaaaggcacaaaagaatcaggtgaatttaagggagttgagtcttaaaaaaattatatgaacttgtgtgtgacccaatgaatgcatctaacttacctaattgaagttacagggaggtttagatggagcatctacaaataaaaaagctatttgtgatgacgtacctaattcaaaaaggagggtatgtatctttatggaagaaatatcataacattttctgcattatctcataaactgtggtatagatctctgttcattttctgttatggacagagagtgtatggtgacaacccctcgcaagaaatttgtatgtttgaggagggaaacattatggatcagcaggacaacagtttgatggtaatgtgatatagcaccatcttataactgggaatagctgtgtttttttacttgggaatagcatttattttctctcttttacaatagaatacacaaagccatgtgcacgatgagaatttgcaaccaccaaccaagcattctactgtttacaaggtccttgcctttgcatttaaaatattattatatatatattcactattatttacatagcattcattataatcatatgccttcttttactctagaatacacagtctttgggccagaatcacagtgggaagcaaaggaagattacttcctgtgcaaacataaacaaataattggaacattatagtttgtgccaattttatgacctattccattgcagcgcaaaggaaatttggaccagaatgagcttatgcaaccagggaagagtatttctagtgcatacaaggtgagttgattaagttctctctttatcctttcaaactcaatgccatagtcaataagtgtttgaaagtagtttaatttcgatatataaatgtatatatagatttgtaaaatttatttgttaccttccactgtagaacaataaacctgacaaccaggacaactatatggtgaatgcacacaaagttacaagtacacacaaggttattttttcatcactttaagtcaccatgtctacagatataagctctttgaaactataacacacatgatttactagttataataattgtattgcagaacaaagagaaccttacccgcaagcttgttagaccaagcctaaacaagtatagtactgcttctaaggttagtctaattgtttcaagttcaaaatgctatttctgtttattgaacactacacaacaactaaaatagcacacacagcatgttggtttttactgtaaattctctctattttttcagaaacggcaatgcaacacaatggactttttaactgacaattcaacagtggtaaaccttgctaacattttagtctaaatagtttaataaaatctggtcttaatgtccttttattttccactgtgatagaaagtgtatggtgacggtcccttgcaagaaatttgtcatgttgaacaggaaaacattgtgatggtaatatacataaatttcattgttttatacatgggaatagttgcactattttgtaactgggaatatatgctctctttgacaacagaattcacaaagccatgctcaagatgaggataagacaccaccaaccaagcatgctactgcacacaaggtccttgtctttcaatttatatttttattctgaactcaccatggttgcatcctattatatggttatcatggatacatagcattatattatttggtattgtttgtaactaactatgaatgtttactatagttcatgacaatgtgatgtattcttttattctagaacaaacgaacctttggcctaaatgaccatgggaaacagatggagattatttgtgccaaggttagttttcacttcttattgagttcaaaaattatttgatagaaaagtttgaaagtaaaatttcttaatatatataattttagcactaatttgttgccctcccctatagaacaagaaacctgacaatcaggacagccatatggtacatgcacataaagttggtggtgcatacaaggttgtttttttattcaccatgtttacaaatatcagtccattcaaactataacatgcatgattcactagtattatgattgaattggagaacaataattagctctgtttggtctttctttctttctatcttgtggttaaattgcaaaccatgatccaattttttttataggaacaacagtgcagcaaaatggactttatcactgacaattcaatggaggtattttactgtgaaattatttatgatacttgaatttcttaaagtatattgataatattgatggatgtattatgcacttcaggttggaactaaagtattcttaaaaagttggaaaaatcggaatacaaacgtggctcttgccactattgtaagctgtgatccaacacgcagagttggaggtgttgagctaggaaatgaatttttaatggttcatgtcgatcttgcattggcaaaatccgaagatttgattaggccatacaaaggctacaaaattgttggtcatgttgtaggacttgaaattgcgtggcctgcaatttttatatgttcctatctcttacttcttacttcggagatgtgcttttcgtcttcataatggtatattaatgcttatatattttttctattataggttgacaagataaatgggtgaagatgtgggggaaattttgtgactgctagtacgcaactaggtcacctgtacatgtcacggaatgatgatggctgcaaggtggagaatgggggcaacaagatgtgtttttttatatactttagattctattttctgcattaatgttctgaacaaaggtttaatgccatgaattatactgatgattgtctatgtaatgcaaaatactatatttaatatataatcgattatcatgattgattggactattgccacttgtgcatgctttgagttcatgggtctcttgcctgacaaaataattggtcaaaggccacctacagtggatagctcaaattacaatatttgtacatgttgcagcaacttgattatatccattgctaagattatataaaactgttcatctctcaagggaacaacatatataagtattgctgaaacctattaaaattgttgctaagtagcaacgcttatttccacttgttatcaacggttgtctatgtgttgtaattgatcctagcaacggcagcataggcaacgcatattaaatgcgttggtgcagaccctagcaatacttatagagacttttagcaatacatatatgtattgctaaagagggttcctcttgtagtgatagtgcctgcttgcaatcgccgttgtgtttgctctccttcgagcgaggagttgttgatgtttataggcatcggttacatctctactctctacacaatgtgccgacgggcagctccgatgagtgtgttgtgctagagcagccggctgtaggtgatgttgcattctttgaaccacatcaacgtttgacgcttgttacggatgatcggaggtagacgcaatgaccagtcgacactggtggagaaaccatctttggtcggtcagccaaatttcacaatagttccggttctaataaaaaccgggactaaaaagcatctttagtaccagaactaaagatcatttttactcccggttcaagaaattgtcaggttcaagatataccttaactatttttactcccggttggtataaacaaccgggactaaagatctatttttagtcccggttgcttataccaaccgggaggaaagaacacctcgagccgcgtgcgccatctttatccgctctcctctcgatctcctctcccctctcattaatatttcctctccatcccttcctctccccttcattccccatctgatccttcctctccccttccccttcctttcccgttcgcccctttcccctctccggagcaccgggcgggcgggagcggcggcggccggccggccggccggccgcgcaagcgcggcgagcggccagccgagcgggagcggcacggctgggcgggcgagtgcctaggcgggagcggcgacggccggccgggcgagcgcggcgggcgtggcgggcggccgggcgggagcggcgacggccgggcggccgggcgcggcggccggccgtgctggcacggaggcgagaggacaggaggccggtggcgccctcccctctgctgccggatttttttttaatatgtgattcattggatttaatctgtgatgtatgtgatattggattggatttgatctgtgatgtatgtgatattggatttcatctgggatgtatttgagttgtggtgtatttcttttaggatttgtgatgtattttttgtttgagaatctgtgatgcatttcttcctaatctgtgatgcatttctttccagatctgtgatattagtttggtttgtggataatttgaggatatgattgaggatatttagggagcagatcaatttgagaaaaaaaaagaatcaaccgggactaaagatggatttttagtcccggttattttacccaggactaaagatgggcatctttagtcctggattcgtagtcccgattgtataaccgggagtataggggggttcccacccgcgagtaaagcccctttctccaccagtgcgaccacgcaccgaatatcttgtattttgtctggcagtgctagcacagcgatacctagttgtgaacccaaagcgaaaactagtatgaatccttacatttttcggctccctttgagatggaggattttcaaaggtattttcgagaatttaacttcctaagactttttttagtagggagccctttgattcatatgaaagatcggaattttctatattatgcttctatggctcaatatcataggaaaataagcaagagctcaaatcttttcgaaacctttgtgcctttttctttcttgtgatgctattaaagggatcctcctcttctttcctgtagaacttcagaaacatgtcactccaattattgtgtttttcttattctggccttttttttcctattatgcatgttttaagagaaattttatgaggtatcgaaatatatcattttttacactaaaaagtgtgacaccttccaatacctcctgaaggatggtaaaatcacacacgttttaaacatctaatagtgtaattatttaatggtatactagttaccctggcttaaaatagctagaaataactagggtgtgtgctatagttaacaggtgggtccagaaaggaggtgcagctggaatgcattacatctaggagataccaacgatcgatgcacatggatatatcctccgtcccataaaaaatcaacctaatatcagatgtgacacatcttaatactataaatctgaacatacatatattcagattcgtagtactagaatatgtcacatccggtcctacatttattttttatgggattgagggattgctggattgttagggctcggggtgcaaataaacagtaagaccggctacacaaaatatatgtacatatataataaacagtaagctaaggcattgtccatcctgcagctagctatataggtactcctatatgcttggaaggcatcaggaatcgatcggtgatgcgtacgagcgtgccactgcctgcttcgtgaggacacatcacaagttgttgaccgacgatcatgcagacaagtgacaagtgttccacccaagctagcgtgacacagcgaacgtgatcctcggcagatcgtatcacatgtgcctgtgcatatgtagcttgcatcacgtacagtcgtacagacaccgaccggccgccgtgacgccaatctgatgatgagtttagtttcctgcttctctatgtagctgtcgggcgtacgtgtaattaagcaggaacgtcgaccctattgacttgattatatcagatgaaaaagatcaactgacgtacggctatatatatatatatatatatatgctaaaacaagacaggcgtcgttttccagttgtctaaagaaaaaaaacattttgtaataaacaccttggttatattaggggattcaggttgtccacacggtctcttgctataagcactaaaagggtctctcctaatattaaaaagatcggcatctggcgaaactttggttgtcatggctcatcccaaagggactataaaaaaaacggtcataagtttttagtagaaattaaactttcgaatgtaattatagtccgttggtatatgcaagaacattagtgctctgagatttgttgggacatgcgcgtgcaacaggcgtcaatcgagaagataactcccgtacagcgggcgacatgcctctctgtctgtgggttgaatccaaacgaatcggaatcaaaccgtgcccgtggaaatgtagaattaagtcgcggtccgtgaggttgctgagtaggaagcgggcatataggtacagcgcgccgtgaggaggcaactagcagggtctttaccctggatcaggattctctacaaccgactgctgcaccgtgcctttgtcactaacatgtggatccggagattattgaactcgcatgtcagtaacaaaggcacaatgcagtgactgtagaggatctcaatccctctacccttgctttacgtgcgtaatcaagtcctagaagttcatgtgcacaggcgagagtcatgtgtggtttgcaatttcgaatccctggtttttgctggtgggcatcgaaagaaccgaaatcacaccgatatggtgagtgcggctgcctcatatctatccatggagcacatataactacaccataaattaatattatatacaaattataatataattatatcataattgtactatattaatatctattaaatttttatgaaaaaaatttgtcgacaaatatctagatagtcccgctgtacaccctagctagcaaatcaaatctccactatttatatatagcaaatccccaaatcataattaacaaataaagcagtcaatacttgtgtcttaaatataagaataaagcttacattaattaatattgtgattgtgccataaaagatagacgcgtcacatgtgacattatcaatggctactagctaggtagctctaaggctgtgttcacatgtggatgatgggaacacagtgcctccgcacggaaaacggagcgttccattagcacatgattaattaagtattagctatttatttaaaaaaaatggattaatttgatttttttaagcaactttcatataaaaactttttataaaaaacgcaccgtttagcagtttgaaaagcgtgcgcgtgaaaaacaagggatttggttgggaacctagaggtccgaagacaccctaaggcaataagcccagagtaccagatgatgcacgtgctctatataaatattgggggatgaaataatgaacccaatttatttatttattccaagtcagagtgtaatagaactacaaagaactgaatctcagcaccacactgatttttcacaataacaataagggatactaagttcgaagtatatataattggcattcttattgattattcaatacatagtttatgtagatggccggggtgtatgtatatatggatccaaattgaactacaagctacctagaagtttgtaggatacgtaggaataagagttaggacaaatgctggtgtgacatttaaattcatccaggcttttttgcaactatttataacatgttggtgctttatgcgattatgtgtgtgtgtgtgcttattcgaattcgggcttaggaggcattgggaattcgatatgcgtagacatggtaggcagtgctcctactcgattgttggtacgtgcctttgattgggtgctgcattcggtgcttgttctaagtaggatggatctatttcttaggccctgtttctttcagcttgggattattataatctagattattgagtcagattactataacctagattattataatctatagtagaataagcagttagttgtttctttcctagattattagaatctagattattgagtttgtgagtctaaaaagggagtggggtggcatggtaggtaatttttacccaataatctggaaaaagctcatctaaatgagcttatcagattataataagctgggctccagattataataagctacttcaataagttatctgtttctttcagcttacttccaataatctagattataataattctaagctgaaataaacaaggcattagtctctgtctaagatggaggatatgctttgtccgggctccatcttttccttgcacttaataatagacattggcttgaggttgagtgcaggggccgggcaaaattgaagctgcgcggtgtgtttgtcagacgtacatctccatgtctagactcatgtatgtaatttgtgcagtttttatgtcgtcagcagctgtgtgctctttcgttctcttcttcttcagaaattaataccggttcctatttagactgtacacatatcaccgcagcgggtgacttagggttaatttgtatccgtacctagttttgaaaaatacaattaattattattaatctatttgtaagcattccattattgcaagcatctcaaaattgtatacataccatatcctgtacagtacttaattggtacacgttttgaatcgctttttatgtactttatttttatatggatcaaaatacccctgattttattggttgcacaacacatgtatatactacagatgctcataaatacatcttagaagactcctgcatatatattggcttggcagctggctagctaaagttgttctgtgctcctccttttatttaagtattgtaaataatctttaattattttcttataaagttatactatagtttttcctgaagaaaaataaccacataacatattacatacatgagtctagggtataaatatagtacacattgattaattttagttcagggcttgaaaggcatcaggatagttggacatgccacccacccggccaggtttgttcatcgatgcacgaggcgacattcggtcttgtgccgtgtgcgcaagtgcttggcttggcacggccatggagtcatcgtataactagcacacacactgcctcatggttggctctgtctgtgatgagatcgccgaatatttagccttggaagacaccaggaacagttcatacgagcaaacacgccactgcagctcgtttcctgccgcagatgcagctggctgtgaacgctagctgatgcaccacggactgtggtggaagatcgatctagatcggtggcgttcagatagggttccagattgacgcgggggtgattcttagaactcaatgatagtactctagttatcccgacaatacgatgccaaagagctaagtactctttcatgagaaaatctactgtacggtatcccgtagacaagggataagtagataacgttttactcttatccaatcccactcctttttttctctcttccatatccttcgttatcctcctcttccgcatctccttcttcgcccctccttttcctttccccctcctctccacaaaagagtttctatggaggcatggtgaagatagagcagccccaaaaataaatctagagtattatgccctcctcactgctagatccagggcgagtgggcaacaccaatctcatagcctcctctgtctcatggccacctcctccgtctcatgcttttgaggcatggtgacacccactggatctagctctcatggcggcggggcaacttggaaaaagcaaggtcatcgggaactgggaggataaggcccaacgtgtgctcctcagcctcctccttcaatgtgcgttgtcgatggtgatgaaggggcaacgtgatggtgagccatcatgctcctcacccgattgtgtgcaggtatgtctacaatgtatcatcagtagccgatactcgtagatatcatgcctgatacctatggtttcgcagctgatacctaggtatcagacccggtaccccgtatcatgcctggtacctgtgaatatcacgattaatacctaggtatcaaacctgatacctgtaggtatcaggcttggtacctgggtatcatggttaggtgtcagacctggtacccgtatgtatcaggcctggtatctaggtatcatggttaggtgtcagacttggtaccctaggtatcaggcctggtatctgggtatcatggttggtactcacacgtatcagatctagtacttaggtatcaaggctagggctggtacctgcaaagtatcaactatcaacgcttcctctcctcttttcccttccccttggctcaactctcgttccttactgttgtgaccagtatcgttgcctacgacactactggcactagctcaaggtgtggggggtgcgagaacatggaagttgggggagggggatgacgctagatttatggggaggaagttgatacgctagcctctataaagtatcccgttcgaacggtatcccgttctctagcaaccctcctcttttatccactcgtgtgaatggccacataggcacatatggggatataccagcgtttattggttccagctagtgaaaaatgcatctcgaatctgcaggataatccaacgataaggaacctaagtagatatccccgcatgaggataaaactatgacgttttgatgatagagatctactccctccgtctaaaaatatagaaatgcatacacatctagtaaattatgaacacttagatattagttcatttggactatattaataaaaacaataaattatgaataagtgaaatgctataagatggtatcccgttcggaccttgtctataaaaacaaaaaattaaggggaagcagattgatatacggtctgattgatcgaaatggatgcctgctgccatggtgtgagttcatataaacagcaaggtcagggccatacaagcgtacgtgctgctcccacaagttcgtgtgcagatcgagactcctcatgttagcacacgcactagcagcccgtatatatgtgttgggattggaaggcatccgggaagtttcgtgcgagcaaatacgccttggcggctcatgtcatcgtgcagctgcaacggcgtcgtacgtcgatgcgacacaggcatcagaggttgctcccgagcactggctacgatagtgctcgagatcgacgtcgcacggctgcttcctcgagctcaacggttgtgctctcatcatcgcgacgatccaatggcggagctctagaagcacaacaagcggcagatgatctggaaggagtactggtccgctgtctgcaatgtcatccaggtccagatgtctaacgatgctcaagctggagctccaatccatggctgtggtcatgcatgtgtaatcccgctttcaaattcatcattgtttttttttcttaatttacatgtttaatcgagtaatttattttcgaacggttagacagttaccgacgttttatataaagaagaatacgttctattttttaaaaaaaaattggaccaaccaatacaatacagaattaattagaattaattagagtaactggggcaaaaaccaccactctatcaagaaatttatgtatgcgttcttcatccatagcggagtcctaacagtacctcatttcaagaaaaataataaatagaaatggcttctagggggttcggagttttaatctccgacctccttgacctcgcgtccctaaatgtgtgaagctgtctatcacggtgagccttgctagctcgtgttagtttgcggactgatttaaccgatcgatgttgtaaatgtgtgaatgattgatcggattcagttaagtgaaaaattaagattgaaagcagaattctttggctcccctgaaatttttttttgtcctcttgaagggaaagctagcatgtgaagttgagaagttttgcgttcttatagcaagaacaaaattaaatatattagaagagtagtacatgtacctcagaagagatcagcatgaatgggaggactaacaggaactataattatttttagccagggctagacaataattttagatgttaaatattttcttcatcccaaaatatagcatctcttaggttgtgttcagcacccctagcttgttcccaacctctcttccttgtttttcgcgcacacgcttttcaaactggtaaatagtatgttttttttgcaaaaaaatatatatatatataaaagttgttttaaaaaaatcatattaatctatttttcaaaaaaaaacttaattaatcatgccgtaatacatgtttcgttttgcgtcccgggaaccccttctcccgaacacagccttagtgttcaaaatatgtcccagaacatagtaacttctccacctactctcttatctcaaccatatatatatatatatatatatatatacacatcctcatccctaccgttcgaatattcttcatttaatttttacgtctgacggagcttggggctcctcaccgggagaccgcgcaggcccccctttgccggttcggccggggaccctgggtgaggttctaagctcctgatcagtggaaagttcgcgagagtggaaacacacaagacacgggcgatgtatacaggttcgggccgctgagaagcgtaataccctactcctgtgtttttgtggatctgtgtatgaagaagctacaaagtgcgagccagccctcgatcgttctgggatcctttttccctcgatcctctctctaagtgggcaaggtcctccttttatatctcaaggggatcccacatgcaccatctctccctctctttcttttgtgtggggactcatcctctcttccctccaacttgccttatcttcattaatggacggagatttgtatggctgccgtccgaatgaccttctgatgggacggcccatacctacctccacttccgccggaagcaggcgcgacgtgggaacatggctgtctgctgacgacatgaccattgtcagaccggtcacaaatcggtcattcttgtccaccacgtgtcagtttaacaatctgcatgttcgcccttcttcatacaatatcttgcctgtaatggttaggatgaagcctggcatatatctgaccggaaccaacgtgccatctccaggagctaacacgccggctccggctagggacgagtgcttggaggctctcgtcctgacgggatggggcgaggcgtgcgtcagaccgcctgtcgccacctaacccacgatctgaccggtctgtgactgatcacagaccggatgaacgagcgcgctgcactgcgttacatgcggcgtgacgcgctcgtccaaaccgcaataaatgcggttaggtgagcgccgctgcgctcacctaacctatacacgcggcgcaaaatccacaaggggtcggggcgccccagccctcggggccgaggcgggagcggtccgaccccctcggggagacaaagaggagggcgaacacatcaccctcgggcccgacgccccccgagggtgccaggccacgtgggcgattgtgtctgcctcaagcctctagtcatgatactcccggtcctatgtcaccgacaacgtcaattttaatttccactgaaaactcctagaaatacttattttttggaaactcaggttgtatatggaggcactagaatataaaaagttagcacgtgaattgatcacagaagtgtgcaaggtcagcatgcaaaaggccaatatattcaaggtttcaaagcatgcatgtacatggctcaaaaacatttgtgatttgggttgggcttagggggcatggggaattcaatgtatacgttccatattgatctagtttccacctcatcgtagcgatgggcctttgcttgtatgcggcttccagctagtgttatcttgattgcgagccgattgtgctctataacgtagctgcagagggtagtgttgccgttagtaagatatgtgatgtttcttcatcgtaattgaacggaatgtctttatgtggcattactcaacatgaatcattgagcaggaatgctttgaatgcgtgaagcatctgtgagattcagctctgcttgatcggattctagggtaacaatgaacaatatctgcacaacattggaggaacaaacaacaagcagtgtctctcgttcaatgtagtgttttggagtaagacattaaacatttaaattgttccgtagaaatagtgagaggggttgggggggtgtatgtttgtgtgtttgtatgccattccacattgtgttgttaacttcattttttgggggtgtgtttgtatgccttttcatattttgttgttaattgtagattagtgaatccatgtttgatgtgtacgtatgccatttcatattgtgaataacttttttaaaaaataaatcggtacttggagtgtaccaattttattgaatattgcaagagtaaaattaaaatgtaatattaaaaatttcttttattgcaataacctaccaatattgcaggtgagagatataggaaggcaaagttgcatgatcgcaacatacaacttccatcatatgccaatcgtgacgctctgtaaaatctccctcgttgattctcaatgaaaatatatatagaagacaaaagcctctactcattttgttcaagcatacatacatgcatgctcgatcagtgagacatcgtgatttgcgttggtgcctatgactggggattaggaggcattgggattaatattgcgatgttcaccggttgatcgagctgatcaagttgcagcgtcatgagagcattctgccttttgcttgaatgcagcttcaggccagagcctacttctgtcatcgatcgtgggtgccaacactagctatcttatctcaccatattgcaaattgcctcctaagaagtagtagagatcttaatattaaatctaaatcttttgtatgtgtgtttagtgaccattgtcgacaaatggataacatgctactgaccaagttggtgtaaccatttcaagcggtcatttctaaaaaaaaatgtaaaatgtggaaatctatacgaagttatgccctatattatattagactctcaatttagtattctttctaattttaaaaattttagacgataaaagaaaaactattgcccaaatggatgctcgtgaaagcatcaaggcaggaggccagagagagggctaggtatctggaggcgaaacaagtgaaaattaaggcagaggcagcatacataatgagacatatccggtgaaaatgagttaaatgttagaaactcataaaaatcatacctaaaagttttgtaaatttatgaaaaaattactacagataggtatagatatgaaatacattctcaccaaatctaaactccaaactcaacttcgtttagaatttgtcttttttgtttctcctaaacgaagttgagtttggagttgagtgattcacccgaaatttgtctcttttttttctcctaaacgaagttgagtttggaattgagatttggtgagaatgtatttcatatctacacctatctctagtaattttttttataaatttacataacttttagatatgattttcacgagtttccaacacttagcccaagataagaaacgggcggaggggaacgatgactgcatctaggagtagatcgagccgatcggagcgagcgcgagctgagttgtggtgtgttgagatcgctcttgaatgagccgagctgaggttgaggtacgatatggactcgattgtgtgggccagccatcggatggacaccttgtccacgcgtcgtgaatccgcgtcgggctgcacggtctgctgtttgcacccggtatgtacagaatttttttccgcggaagagcgttttcgcttgtcgagtcctccgaatcgaccgattgacctctcctccgaaatccgaatccgaagaggagtcgatcggtgtacttgcgatctctataaattaggcacatgctttgtccactgctatcgtacgtgtctggcctgcatgctgcaatggacgtcgacgacgacgacgcgaggccgacgaaaaggccgcgcgccgccgccgcgccgccggcgtggtcgcgatcatggtcggacctcccggtggagatcgccggcgagatcctcggccgagtcccgtccttcgccgaccgcgcccggttcagctccgcctgccgccagtggcgcctcgccgccgccgagctccacggcggcgccctccccccgccgctcccgtggctggtctcctgctacaagggcgccttcgactccctcccctacggcgaccgccactacctcgccctcgactcgccggcctgcctcgcctgcgacggcggctggctcctcttcgatcgccgcgccgccgccgccgtcgccggcggcggcggcggcggcggctacctcctcaagaaacccatctccaaagccgccatggagctcccgggctccttgtccggccctcccgccgccacggcggagatgaagatctgcaagctcgtcgtgatgtcacgcgacctcgtcgccgccattgtcagcaccagcggcggcggcggcggccgcgccgttgccctgtgccggccgggcacgtcgccgtcgtggtcggcgcatcacccgccgggaggagctgaccaccagctaggcgatctcagggacatcgccgtccacggcgggaagctctacgcgttgcacggccacggcaacctctgctcctacgacctcatcgccggcgacggcgagcccaaggtgtcgtcgtgcgttcaccacatagccggcgacgcgctgccgccgaacaagctaccggaggagcacgacgcggggcaccacctcgtcccgtcggccaccggcggcgagctgctgctggtccggcacctgtacagcaggttcctgggcaggcacttcaccgtgttcgtggcggacgtgggcggcgcgcggtggtcggaggcggcggcgtcgagcctgcgcgaccagctcatcttcgtcggcacgggctgctccagggcgctcacggcgtcgcactacggcggcgtgggcgccatgcgagggaaccgcgtcttctacacgaacgacgtcgaggcgtacagtagcacgcacagctatcttgtctacgacatgatcatgcggtcaaatggcccggtttttccaatatatgatgatgattatttacacgaggggaggaggagatacagatacgaggacacacgataccgctcctggttctttccttcttccgtgtaattcaattcagtaatgattgattaatttgattcatttgttgtaacttctacattaactatagttgagtgtattttcagttgtcataagaattactattagcatgttgaaagttgtcataacttgttaactatgagtttgtttggtttggaacgaatttctaccttaccaaaatcttggtagtgctaaaaccttgataaattttggcactactaattaggtagtattgaatttgaactattgtagcaaaatttggtagcaaaccaaatatacacttctactattgaagttatcaaaattttagtaaggcaataagttggtattagaccaaacaagtcctatatttttagttattataagaaatactccctccactttaaaaagaaattttcttgtccttaaaaaaaataccttgaggtacctaaattttataattaaattttttaataacttgagagagtatataaagatcaaattttatattaaaaattttaatacttataccccttattttaaaatatgctccctccgttttatattaaagggatcttgcttctcgtacactttgcgttattggtaggtgaaatcttgatcgccaccaacaaccatgcatgcattcacttgcattgcacgtggtgagctcggcgttcggcacgacgaattgacccattattgtacctgtctctgctgatcaatgaacaatgtcagtgaaatcatgtacataatttccctccttaaatttcacatgaaaaaaaattgaaaacatacgacagttacatttttttccccaaattttaatatacctaacatccagttgatatatttttgtagtgaagaaaaggtgacgaagttataacagcctcgatatatgtaagctgagaccatatagctaggtccatgctagcaggcatatgcaatgggtagctcgatctacttctgctctagctcgctcgctcttcatgctcattgctcaggctttctttatattccaaattttttcttcaaactttcaacttttctatcacattgatcttttctacacacataaatttttaattttttcgtcacattattttaatttcttcaaacttctaattttgacgtggaactaaacatagcctcagtgattggcgcctgcttaatgctaagttaggcctaggagacatcgggaactcaacttgcacatctgcgcagtacaaagcttaatttcactgtggcctagcctcgcggataatcctccaatccgcttcctttcaaacggccttacggtggatgtcccacccagcgtgcaacgaggtgtacatggaaattggaaaattttgtctctgcttcggctctctgctcgtgaaagcgaaagcttctgctctctgctcgtgttgaactctgcagcagcgcaagcatagcatcagtgcagtagtggtgcacatggtgatcgtctacacaagcgagttcctaatggatgcattcgttcgacatgtgtctgccgctgaatgaatgtgcataactgagactaataaatagtgagactgaagtcttttttcacgaacgcgtaaaataattatgtattaatttatttaaagaaagtgggggtttttttacacaacccaaccgaccagatggcaaatacctgtggcaaggaaacaaaatggattgctagtgtcaaaagaaaaacgatgctcctacatagagggggaaggtggcggaagagctccactattagagctccactaatcccccccctcccccggcgctgccgtcgtgtttctcctccagtgttgcaacttcaatctgggcccttgtgctaaagcgagatcaattgcggcgtgcagggttgtcccctctcttctccaggattcgtggtcctccgccgcctggtcgtcaactccaccgccaccgccgcttcctggacgtcaactctaccgctgccgggaacgatcgaacgctgcatctacccttgctcatcttttctctcttgattctacccatcccggttagatgtgttttggtaccgaacggtatcagtatcgaccgatacaacctgctagaccgtaaagacgcaaaaaaaaactagaaataagataaacgggaaaaaagcccactaactcctcccacttgcatccttgtatactggctctcagtatatacattaacagacatcacaagggtatatagctccatgccaacattcaggcatgttgaatgcaaggctatagctctgctctctgctctagcttgtcgatgcttgttgccctgcatcttggctcttgtgcttagtgagtggttagttagggattagtagtcatcgggaactcgacatgtacatgtaacccttcaaatactttcacttaggcctagtgttgcttagtcgcttgcactctgcttcctctaatttttccttcccgtgctcaaagttgaacttcaacaaggcagaaaaacattgtgcagagctggatcatgaagaatgaaagagaaacaggattagaacgcggcgtctggcgggtggatgcgcatcggcgtttgtctccttgtaatggctcgtttctttcctgattacaatctggtcgaccatattcggccaggccgagtaattcaactgcaactatccgaaggacgggaaattttatagtttttgagggagatataaaaaattttattgtaaattttcgtaccttctaacattgagaggtactgaattttacatttatcttcttaagagctgtaaaatcacttttctgggaaatatcacattgttatctgaggctttcttccatcattaaaagggtatatgtcaagtggtaaactcaattttgatagaacactgacagtgaatgaagagaaactcgtaaccattgatgacatcttattaagacaagaaaaggtgatgatgttacaatctcagtaagttgagaccatatctctctaagtgaaagttgaaacctaaagttcaatgacattgagccatgtatcgtaaaaatatgggccatcgaatataacaaatgatacaatacctgccgttggatcatagataagtctcggtaaaaaaaaaaaagatgaaagatcaagattcttcaagaagcttctaaaagatggctgagaaagaggacaagagaaccaagagatggcatcttcatccctaacaataaatacttcttaacctatgctcctaataaataaaatatattggagaaagtattactctaatggccaattctcacacctattggagtatgaacttagtacaagaatatacagcacagtgaatctttgttttggtttgacacaaaaaatatctttgaattaccaaaaattgtattggactacacttgaaatttttttaaaaaaaattagcacactttataatgtaaatgacttaaactttttttattttaagtatttggcacatcttccaaattcagcttgacatataaattaatctgtattaggctcattcggctagaggatgatgggctggactatagcacaaaacgccttaccatcaccccacacgttaaaaagattgaaaggccaacggtctaactctaaatttatgtcattccgaaaataaaatgtatatcgacactaaattgcaaaacagatattaattattcgttttaactggatagtcaaaataaaattattagcttatattttacatgtagatgtatatggacgggctatatagccagagcacgaacgaaatataagggtgcgataagagggccatgcagtggtgagtacgatgggaaggcagcagcaatgatgagcatgtgttaggagggatacaagtatagtgtgcgtgaaaaatgatgtgtgagttttgaaaaaaaaatagtgatatatgtgttcgtatttttcatgcatgtaattaactggaataaaaaatatgtttgtattatcactagactggctgttaatttcactctaccattgactttttgattttcattaactgtaattcgtcatttactttgttatcacaaatttcagctaattactaccaataaacacattttaaatagagaggttatagtcgcgcgaatgcgtgacataatatgctaggatatatatatatatatatatatatatgggccaatgctagcaggcaggcataccgcatctgcaagcgaccatgcaataaaagtatagttctactaattatgctctatctatcttgttcatgctcattatactgctcagtatctcgacgcctgtgtttagtgctaagttaggggttagaaggcatcgggaactcgacatgcaaatctatgttgtgcaatgcttcaactgtggcctagcctcgcgcattggcctgcactttgcttatttggatcagtagccttatcatcgtagcagatctccccactcagcatgcagagtttcagacttgagaagcgagacacacaattggatacttagttgaatcacgggcatggtctggatagagttccaagaccgcatccagcaactcttgatcatctacagctgagcttagcttacctgcataattgtgcaggatatgaaccgtttgtttgatctattctaagtagtttaattcttgtcgttgttctattgcaaaggcagttaaaataattggggcagatccaggataataaaccattggtctgtcacctccattactcagcctcgttcatacatgaacactacagtttatagcagagcaatgcattcccttccctacctccttgcgcacaacaagaatccatcaagcaatgcacaggctactgggatcggtgtgtattgcagtgaaagcgaatgacttgtgcttctccaatatcaaatgcgtttcactctgctcgtgtttaactctgcagcagcgcaagttagtgtcagtgcagtagtagtgcacatggtgatcactgatcagcttggcattctacttaattacctgcgctgaatgtctgtatgtaggcagctgatcgatgaataatgtgactgaaataaagtgtgtcgacccggaaaaaaaaataaagtgtgtcaaatctcccctccttaaatttcactggaaaagatgaacggggtagcaatgccataccaacaacagttaactctagctcctactagtacaaataaacaagacatcacaggggagtatacatttatttatagctccatgccaacaggcaagcatgtcgaatgcaaggctaagctctacttctgctcaaggctctagcttgttgatgctcattgctctgtattgtatcttagtgcttgagcttagttagagagtaattagagcttaggaggcgtcaggaactcgacatgcgcatctctggattgtgagtctttcacttaggcttagcgttgcacgatagcttgcattctgcttccattattcgcaatatcagcgctccaggatgagctccatagtggcatagaaacattgtggggagctggatcacgaggaagggaagtacgcagcgtccggcatgccgatgcctccgttgcacaatgagacatgggatttagatcaattgttaacttgttcttagtggtatcgttcttctaagcaatttgcaacacttcgatctcaattaacagaaaggaaggccggttcttcctcttgatgtttttatcctggccaaaatactcaaatttgcataaatcctgagctgtccattatccgatctctcttacacactagcatttcagtttacccaacggatccttacttctcatacactgggctggtggtatcagagttggtgggcgacggaccacgacgacgggggtagaggaggcgaaagcctagcccagtgtttcactggaccggcagcggctacgccttcaagcacggtaacaaaacacttggtcggcagcggctacgccttcaggcgcggtaaccctcttgggggcattgtcgaggtaccctcctccttcgacgaggatctctaggtgaaaaccatgtctagtctctttggacggacaacgacggcgtcttttgacgtcactaccttcgtgaaggcgttgtcttttttagaatatccgttatgtggtgttgttgtaagcccggcgacgacctgccttgcatagcggcggccggttcggtgttcggctctcttctttgtagcttgtgtttgtgcggttggcatgtggtgtcggggagtgtgctttggtgcacatccttcctcgacaacttgttgtcgatgaaaaaccttcttgtaacatttttttcctcctctatcttaataacattggatgacctccttcggtcatcccgacaaaaaaaaaagtcttaatttttggcaggacaaatattgatcgccatcaaggcaccaaaccatgcattcactttgatgcacagatgcatgtacacatcagagcaatacatccgttcctagctctccttatgtacaacgaaagtccatcaacatatagggagaaataacctgtagtcttttaggctttttcccttctccattttcttggcttatgcttggaatgactcatgaaaagttctaggcagaaggaaggatgtcgagggccacttccttcagtgatggcatctcttcttgttcatgcaagcagaagaaactgccacctatgtttctcagaaccttccaaggcccaggataacacctgccagacaacaaagtttcggcaaaatcacacgtttaatctccacagtttgctccataaaggttctgaatgcaatcatgtttttctcctgatgagataaacatactgcaacttataccaaactaaatttctgcaactacatcttggtatggtgagttgatggtaacaacaagctgaatatatttgtttcaaagcattacatatcaagaaacaatagccatgctggcgatggtgacaataataacaataaaggatagaacgcaacattcaagttgtcatgttaactagagcatcattcaaactgggtaacagacaaaatcaactagggttattggagtgtaagtaagttaattatcttgccaaacacagttaatcggatcctccaaaaagtatggcagctgaaggcatctaatttgggtgccatatcattggtacattgattcaagaatgattggccaacataaaactgtataatcagtcaatgaattaattaattatagctagaccaaaacttgctcatgcaaaagcatagacatgagtcagtggtgctaattttggagagcaacagaagaaggctggaatatgcaaacctgaaaagtgttcctcctttgagtcccttaaaattgtgaatataataaactgtctccagctttggaagaaatgttttggaaagttccgctagctttgggtagaagaaaggagggtagtctttgattggtcaaggaaatgaaccaacacaaatgatagctaactagaatttcacaagcatactattttcaaacatcatcagcgcagcttctcttttgttgaggaaagtcactagcactgcaaaatttacacatcatttgtgatgcaggaaaacaggtttgatttaaaaacaaatttaataacttgtttggcataagatcaactgtttggcatcatatatgcactagaattagcagtttagcacagaataattagcagttttgtcatcatatgaaatacaaactctaaattacaaacaaggatacacccacttcttattcgatctagttccccgttgaatattatcagttttcggtctgtgctaacaattgcttccttgtaaagctcttcaaccacaagcatttctggaaaacatcatcatcatattagtgaagtggtaaactcaacttcgatagagcaataataataaacagaaacacataccattgacattgaaatagggataagccacgaggaatatctcgtcttctggacgcacacggtctgacattttgacctttgttgtaaaaccaaaatcttcaaatagggatggttttgttagataatctagcttcagggaacatccttcaaaggcagattgtcttgcaaatgaaacttcatttgcctcagggaagaactgaaacatgtcagataataaaaatggaatcaagcaggacatttcaagtttaatttcagcacactggtttgtgcttcaatcactggtagaaaactgccagtgattatccatgtacaactttgtctttttgctgtttataaatgagagtcaggaatacatttacagattagcctgtagtactagttactagaaaatggtcagaacatacgattctggttcttgtagctttctcagcagggacaaagcgatcacagaattctcttataagaagcatgcttccagtcatctcaattccaccttcactgtcacctaaaagtaaaatagaatcttatatggtatcctttccacctgagtcctgaccaatatcttataacaaggtaatatacataaaggttagctatgtagaacctggtacagattgtagtcctgctgtagggaactcaatttcctgaaatacattgcatcacaatttcttgtgcaaaaaaaggaataaaaaaataagtcagacagtggacagattaaggctttaccaatagctgcttcccatccttaaaagctgactcagcagcttcttttgcctgaaatcactacatgtatagtgaattagtcattcgattattctactccctccatccctaaacaagtgcatagtttctggttattacagaaatacagtttccagcttcagtatattggatatcccagtacaaaattacacataaacccttcatatgttattttttggacatctatccacaacgatgacttcgcaactagttcagtagagtgcaaaaaatgagacatctaaatgcggtgcctttgattatacacctatggtgctccatcagaacaggtaacatgcacggaaaagttcagtcttgctgataagcaacccatcaagattctttttatgaggtgagatctcacaaaattttgaccaaaatgtacatgaaccacccatatttcagtaatatcatcacttaaaacaaacagctggcattgttaattcagtaatgctgccactgtctgaattttttaagtgggttaactggattatcttaattgagcagttgcaatagcgagctacatgcttatagttatatatactcaagtaaagagactaagataagcatgctttatgattatcaactatcagtgaacaagttttcacactctgacattaagtacctgcgctagaagttcagtgtaatcgcttgggaactctgccccagacacattgcgagtgccctgacctccattgacggcacaaacatggaacccagttcttaaattcctctttgttgtagtataaataccaccagtgtagttgcccttgcctttgctgattgctcgaagtacccaacctgggaccttgaaaaaaaaaatccaagacaatgcataagcagaaatgctgataataagtacaacattaagaacaaaagatgttgtagcttgtttgtgatagcatacctgtttattgggaaaggaagttttggataatggaggattggagatggagcaataactggttgccatggtcactgaacactggggatgggattggtgtgttggagagggagggagggagaaacaaagaaggctatgtggtaatgtagaaatgtttgagcagcaatctgtttgtggggccttactgtgtggtctccaattggagagagatgggggaaaatatcttgtctgttatgacagttctgtgcatatgctgccattgggtgataagatggagacgttttctctgctagttttgttttaaaaattttaagatggtggacaactatacagaggaaatctagtattttgcatatagcagcttaaaatcttggttgagaaatgagttgcctgaacagaagctgagtaaaaacaagcggtttaatgctccagtacttcaccttgcctttgcttctgtcagccatggacacagaggatacctaccaattggcaaaatgttgttttgagcttctcgatgttagccttgtaaggaatcctcagaatagaacggagtgaggtccagcataatgaatactttcagtaagcaatttccatctgggcatatcctggcctcgaccaaaaatcggtgtctgaactctgaagccatgaagatcgtcaaaaatagtagaaagatcacacagaaactttccgaatccattctgacgaccatagcaccaaagcactctgcctcttctacttcggcttatctgctcaagtctcaatccaagtatctgctaaagctcgacagaatttgacagcaatacagtacagcgtcgcacaccgaaaccgaagtcagaaagctccccccgctctgcagatatgcttcctcttggtttagctagaagatcattgtcagccacgattagccattccccgatggcatcatgtcaaactaaagagctccctggcctcggcgcccctcctgctcctcgcgggggctcgggccacgagcggaatccctcgtcggcattacgtcgaacaccacgcgggcgtcggcgggcgagcatccggttccagatgaagcccagagccatgctggttgcagacttgcaggcttgcgagctccacgcgaacgcgcggcggggactactccgctccgctagccgggcagagggtggtgatgccgcgatgcctgaggtctaccggaggatatcgccggcggcgtgctccgacggcggcggaggagaggagcggcggtggcgtctgcttcgggtagcgtgtttcgccacgtgtacgaatctcggaatgtttccaggcgcatccaacgacctagagtttcttaaacttactatggaaagataccacagaattcttgcatccaaacatactacctccgttttttaatagatgacgccgttgactttttctcacatatttgatcattcgtcttatttaaaaattttatacaaatgtataagatataaatcacacttaaagtactatgaatgataaaacaactcataacaaaataaattataattacataaattttttgaataagacgaatggtcaaatatgtgagaaaaagtcaacagcgtcatctattaaaaaacggagggagtattatatgagaggaagtttaatagtatagccaactgctggctctaaatcatctatagtcaacttaatagctaattcatacaatagttacttataaacatatactgcataattaatatctggtcccacatgtcatacacatgcaccttggaggaaccttaagtccgtgctacagctggctacaaatctgtaagccgttgcccttctctcttctcttttatctcttcgaaatgtgtttatagctggcttatagcctgctattgtacatgctctgaagtaagtatagtacatttcacatgcatcaatgggtactagatcttttatgcaaatgtaggtgtagaaatggaaaagaaaaacaataagtgttttgcaatagcaagcttaatcataatgattcaactataaaaacttcaacatcctcattgcaaataaatcacctgctacttgcatccaaaaccaggagatgaattaaatctagggaaaaaaatgaatttaacaatcaaaattatagtttaacgctaaaggatacatatcctcgaataggtgacgaagtaacaccaacaatcaaactaaatggtggttcttcctaacaaacatcaccaagaactctattaccgaacaaatagaattttccccatgactaatttatcagaaaaatcctgcaaaatccgctccttccaagagatttctaaaaaccctgaaacaaacttgtcgcaaaaaatcacatggctcctggcggtgcacctggatggggagctgggagagatgcattgcggaggaccgacatgagcaggtggttgtgcaaccggatgttctctctgccgattgtctgaataaccaccctatcgaacatcgacttctccatccttgaacccaagaacatcttcaagtatctaaagtatcgctcggatctctcatgcccaagccttgtctggatcaactgcttgatctccatggtgttgatgcgacttgggtagggagggattcttggtatggtgagcggtgtgttgctggtgctggtgtttgtattagattgtccttgagcattattgggactgcaaaacgttcagagtcaatgatgagcaaccatatttaggcatgtttagacagtaagtacaaggctatgcaaataagaggggcatgttcagtttgaaatgttcactttttagccaaaatgagcttaaaagtttgtaacaaccatgtaacttacatgaaactctctgtgatggactaggaccctccaatgaatggaggaaaattagagaattcctacaagaattgaactacttcatgtaaaagacccacaaaattcacacattataataaaggagtactgaatgtttgtttgagtaaaataattgtgaccaatgcacgttgattttctttttatacacatagaagattttacttttatttctcttggaaaaaaactatatctcatatctcatatggctttgatttcaaagatctccccgtctcttttcagattattcattggattatgtgctatatcttaaaaaaatacatcttctaaaaaaattttctactgtattattaaatcatttaattttagctattgttttttatttattaaaatattgaatttatctctttagttaaatagactattaataatatttctcttaataatatacatataaggatgtgttcgatatatttggttggaaactaatcccttggacatgttaaatggagtgcctcatataataattaattaagtactagtttaaaagatttgaaaataaattaacatgattttttaaaaaacaacttttctacaaaaaattgttataaaacatacttatttagtagttcggaaaacataagcgcgaaaaacaagaaggtgaagttgagaaagggaattataggagggcctatttagtttggtgtcattttaaatcataccactatttgataaaattgataaatatatagttgcatttagtttagtaatacataggaaattttggtacaccatatttgtctcatcctaccaaaatttagtaattctgtcaacttatcaaaaatttagtattatcaaattttggttaggttaattttagcagtaatctgaacatgcccgaagtcaactttagtaaactacttatagttggcagctttggcgccacgccagcaatttctgcctgtggagagctctggcccactcttcagtcttcggattctccactcttctctcctcccccgcgcccgcagatcggcgcgacggcgaccgcggcggcggcgcgcgatgagcctgaagcacccgcactctccggtgctggacggggacccgccgccgcaccgccgcccgcggggcctcgtctccaccccacccccacccgccgtcgcggccgacacctccccctccccctccccctcccccgcggcgcctccgcctcggcggcgcggcggcggcggagggggaggcgagagggagagggagagggagaaggagcggacgaagctgagggagcggcaccgccgggccatcaccagccgcatgctgtccgggctgcggcagcacggcaacttcccgctccccgcccgcgccgacatgaacgacgtcctcgccgccctcgcgcgcgccgcagggtggaccgtgcatcccgacggcaccaccttccgcgcctcgtcgcaacccctccaccctcccaccccccaatcggtccgtgcatcttcaccaatctcctgcttctccctccacttgtttattatcatttcaatttattcagttcagtttactttgccttcttacttaccagtgcatgtttactgttactgtatcggtagtttgcgtttatctcttagtgtacaatgatatgattggattttgtgagaaaaaactagtcatcttctaacacattgttgtttttaatgttatttgcagccagggatttttcatgttaattctgttgaaaccccatcttttactagtgttctcaacagctacgccatcgggacaccattagactcgcaggcttctatgctacaaacagatgatagtttatcgccatcatcgttggactctgttgtggtggcagaccaaagcataaaaaatgagaaatatgggaattcagattctgtcagctctctgaattgtttggaaaatcaccaggtaagaaaaacaatgtcatttgtttggcttagctagtttttgatattccaacttgtgtaatccctcacagattttcttttgcctactacaattcctaagatcaaaattgtttgaaacactttcaagttcattctgaaaaagaaaaggaaagggtgcccctacattgacttgaataatgggtaatatatatgtgatatatgaaaaaccaacttgtagataatagtatgaatgtagttgggaaaagtgatccttctaatttttttgccactacaaaacttgtatggaaggaattgaacctcctccattgcactcgactcataggtttgtaacttcacataaattggatccatgccattattaatttgccagtttagaaaaataccattataattcttataattgaaacgataccactacaactatcctcaaattgaaaccatgccatgttatacgcctttttttctactgtatttttgtatggaccaatatacccctatcttcttccttcctcctcctctcccttctgttcatcttctctctccatctcttcctccatcgatgcagccagtggagcttgaggtcgtcttgcctcctcctcttgcggcgctgctcgtgtgtggttccacggtggtccagctcatgggcggttccatggcagggtcggccgatggacacccagaagaggagcagcgagagaggagcggcgacggcagggtcggggcgtgcgccggtgccgccgctggggctgagccagtccccgcagccgttcactcttcctcctcccatgctgtttctgctgttattgccgccattggttccgtatggatccatgccgccgcgacgagcttgttgacgtagctcacagccagatctgctcgccgccacgcagcttgttgtcgttgccgggtcagctctccgccgcgccgagctgctgtaggaccatctgtctccgagactttgccgccgctgcgacgagctcgccgccgctgccggtagtagtggtcttgtgtaccagttagtcgctagaggagagggggatgcggacagggtagagcgatgagtgctgccaaatcctagcccctcgcctccatcgttgccggatccgtgccccctcgcttgcgtcgtcgtcggacccacgtcgcctgcccccttgcctggacgctgtcggatccatgcgcccgatctgccgaaaaccgccgccggagagaggagcgctagccgagtcctggagcaacgcccgacgctgacaagagggatgccaagctccgccaccggggagagctcctgctcaccaagagtgagagagagagagagcatgctcatgctgttctaccgaggaggataggaaggttgaagatgagggcatttacgtcaaatttatgtaaaatatgtatatcaatggcatcattaaaattacaaatgaacagcagtggcacagttccaattaactgaattataatggtaaattttcaaacaggcaaatttataatggcatgaatccaattaacccatgacctaaagaaatctaacaaattattttcattctgaactgtaaaattaattgctatctatagggggtagaaagttctacttctgtattgcagtagtgtttttattgtattatgtaacagttttttaatggatttatatcatgcaaatattggaagctagaatagactgaagacctctgcagaattgctgttcaaaacccacaaattcttaaaatttacacctcggcttttccttaaagatttctggtttattatatttttgttggatgatttccttatgttttccttctatttttgagttttaatagctgacgagagcatcagcagcgctggcaggtgattacaccagaactccatatataccagtctatgcttctctgcctgtaagttcctggcagacttcttgattgatatttgatatgctaatatgttatcctcaagttcttcatttgacacatgattcagattttataaatggcttgaacggagtgttcattttgttactaaacttctgaattttgtacttcggaaatttacatccttggctttttttagcttttatctattgtccctagatcttgtgcttaatttgtttcttttgacttgtttggtcatttagctttttttttccccaataaacatggtggtgtggctatggcatattgttggttggctacaaatgccatcaaacgcatgtttttataagaatacgaggaccatagtgtcatataacaaattctatgtaaccccaattaggggcagtcacacatcaccaatcaaccaaagttaatacagtaccaggtttcacaaatttatataaacctattaagttgatctaaacattacaatgcagtatatcttaggtaagcatgatgtttggataaaagaacatgtcacctttcccagttagcagtctatcatgaaaaacttctctgctttacgaaaatgaagtaacaacaaatgttctaataggatataatagaaatttgcaatattgcatgcccacaaactcaccgtgtactggaggcccgttgcaatctctccgtggctgagatgctgtcagtcttcgcaactgacgccctctggtcatcgccgccgtccttcatttgctgctgctgctgcttccctaaactctggccctctggctgtgtatctttacctctctgggaacgtgtcatgggcgccatggagcagaacactactgctgccttgtccagttgctgtagcccttccgtgtcgcctgcgctctgctcgtggcgccggctgatataagaggacgaggacatgtgtttgagcaggcactactttttatcttcattttagcactatattaatcacgtgacagctacgtgctttgctggaatggattgtatgccatgtaattaccataaaaaacaatttcctttttttgttgtttttcctttgatggatttgggtagggggaggtgcaagttgcacaaattatggtttcgtctttatgattttcttttttactggatttactcctggttgctattcctctaatgacctgatggatgtaaacctttaacttctatcatagcaacaaaattggcatacgatctatttagctgactaataactactatgccatgtttatatcttctttacccttgttaaaatcacattctcttatgatagagagaatgtttccatttctgtgatctatatgtcatatcatactatacttgagcagtgcttctgttgctgcagatgggcattatcaatagccattgccaattgattgatccagagggcatacgtgcagaactgatgcatctgaagtctttgaatgttgatggagttatcgttgactgttggtgggggatagtggaagcctggattcctcacaaatacgagtggtctggttacagggaccttttcggtatcattaaagagttcaagctaaaagttcaggttaggcatgttatcatggttgtcgacttcttggatacaaatattcagagacatttttgggatgttagtaatcacatatttgctacttatcatatttatttaatattgtgcacaatagccattacgtgaatgtgaattatagtatgttgtggacagtgatttctatagatattgaggcactaaatagaatgtctatgcagaagacatccataccagtcagaaactcagaattggatttttcattttcgaaatattatatgattaagttttgtgcataacttgccagcatcttgtaacagtgtgaaatattcaacttagatgagcttttcctttttaccatttttatcacaatttatcttagcgagtttccttcaataaacttctcaaggctgtattgtcattccatgggtctggggagactggatctggtggtgtgtctctcccaaagtgggtcatggaaattgcacaagagaaccaggatgtattttttactgatcgtgaaggtaggagaaatatggaatgtctttcctggggaattgacaaagagcgagtccttcgcgggagaactggcatcgaggtattgggtcatccttggtaaattttcttctctcttgcttaaacttacctttagcttctgtgtctattacaagatatagaaattgttagtttccttagatgagcactatttatttatgcctagtgttgtttttagtgcatttaattgtccgtccatctttatgcactgtgctaattgtagtatatattgcagatcataatgttagagtcttggtattgaaaacatagaacatgtatgctatcttctttaatattgtttcatattgcaccctgattgatgagaactagtattctgatacttaatgggattatatgcaggcgtattttgatttcatgaggagctttcatatggaattcagaaacctgaccgaagagggccttatttctgctatcgaaattggattgggtgtttctggagagctaaaatacccttcatgtccagaaagaatgggctggagatatcctggtattggtgagtttcaggtatttacttaaaattcaaacttgtatcaagatagggataaataaggcatttttcttcacagtcctttccactagattaatttaaatatgatagaattacaatcatgcactgtttttcatttaaatatgtagaatcatgagtactcaaaagcatgtcactgcttgttcatatttgtaggttatatactgcctgggcttttggattacaatacatatctgagttgtatgctacatctatgatgcataatgctagcttgcataaaattttcaacattgcggaattgcctaaaaatatactggatgcatttcttttcttttattgatttgcattgtcgacagtgttacgacaggtatatgcaaaagaaccttagacaagcagcattgtcacggggacatctgttttgggcccgtggacctgataatgcgggctattataattcaagacctcatgaaactggctttttttgtgacggaggtgactatgacagctactatggacgctttttccttaactggtattctggaatcctcatagatcatgtggaccaggtgctatcacttgctactcttgcatttgatggagtcgaaactgttgtgaaggtatgcactgttgttctgtaaagttttattttaacattgcaccggatcttctctaagttctttagagaacttctgcatatatcccatgttattttccttttgcctagctatttatcaatattacggtttgataaactgagcacaaaatgggtattcctcttaaactaggcaccaaaaaaatcaatatttcttgtcttatgcataaaaagaacttcaatcttagtatggattgtgctcttgtacccaaagcagcggaagattactcaaaaccttatacatagttgattgattgaaaatcattacctgcagcccagatctagacagtttggttgtaagtctatttgctactggataatatatcactctgttattaataataggaaattaaggtcctatgctctgatgaatctgaatttgaggatcatatgagcttgcaaaattatgttagcatgtgttaaccagatcatttacctgctagcacaaaacattcacataatggatgtagaatgtgctgcagtgagaagtccatggcagttccacatattttgcaacctttgcctgcctgtttgtctattccatgacaaaataatttctttcagattccatctatctattggtggtatagaactgcaagccatgctgcggaacttacggcaggattctacaaccctacaaatagagatggatactctccagtgttcagaatgctcaagaagcattccgtaattctaaagtttgtttgttatggaccagaatttacaattcaagagaataatgaagcatttgctgatccagaaggtttaacatggcaggtgagaagctcgagctaaaaatccttttcagatctgtctgcattttttttgtaccttttgctcccttgggttaattcggtacacatgaagcaggttatgaatgcagcatgggatcatggattatctataagtgtagagagtgctcttccatgtcttgatggtgagatgtactcacagatccttgacacagcgaagcctaggcatgatcctgaccgtcaccatgtctcgttctttgcataccgtcagctaccctcattccttttgcagagagacgtttgcttctcagagcttggcaactttgtcaagtgtatgcacggttagtattaccatgcttgtcacttctggatactcctgaatacatactttaccatgttttttttcctcttttgagaaaaactagctatcttaccggcaaaccgtccttcatataaccatgcggtctatccaagacttgatgtagtcttagcattctatttaatttgagctagattgttaattcttccatccgcattgtgaatgaagataaactgcgtgtagaaaaatgcaaactaattgcctttaacatagattgtttttgcatcttccatgatattaccccgcaaagggtatctctccgctcttcgtcccttcctgtggagatgctgaattcgtaacataaccgggtaaaaatgattttatttacaggggaggctacccagattgtggaaggttgaattccctagttgcattatatgcacataggttttgaaacaagattaaagaaaggagcttggtttggaccccagaaaccgtcgatgcccgcggcgaaatctgctgcgcgattgttgtaaagcttctgttgtgggttttggaggtggtaagtacggctcaaggcaggataataatagcttagcaactcttttttttttccgtggaatggtatgaatttaacatcagagaaaatgacgtgctgtacattgtatacaaccatatagaatagaaatattgtccttatttaggtcacaaatgttaatccctttctgggatgtaattttctgatggttctgtgtgaaatacccgcggaattttggaattggtctgttcaataggggcctgaactggacctagtttgaaacacaggtgttcctaacctccctccctcgttttcggcgtgcaggcttttcaaactgctaaacggtgtattttttataaaaaaaaattctatatgaaagttgctttaaaaaatcatattaatctattttttaaaaaaaaatagcaaatacttaattaatcatacaataataggtgctttgttttgcggggaggagggctcccgaacacagcattaacctagtattttagttttagcccattgaggcccaactgtagagcccagaccactcgcctgcctcagttcatggctcatctctaccaatttctggtgggccaaaggtaggccgtttatggtgagccaaatggaggcccacatttgcgcggagaaacgaaccgtcggcaaccacgcagttgggctcggcccgtctcagcgatcggttggtgggcccaaaatgcggcccagttttattcggtgggatcgtgggaaaagggcccgaaatcccgatgcggcccgcgtgtttggaatcggttcggaatttttcaaacaggtccctgatcttaggattgctataattggtgtttggtactaatgatcctcattttttttcagatggatccctgattaagatcgttgttagagtacgcaccattattgctcatcaatccggatcctctgcattggacgttctaatgcagaggttgacagtactgtgtattagaggagttagcacctatccgatcaagatcataaggtcccgatatcttactacagtaattgcactgtagtagtgcattaccatatttttgttactgtgatttttaccactatattgatggagaggatccgcatccctcataaatggaatcctcatccattactcgttatttattccataaaaaaaatcaacctgtaaaatcatatgataacaaatatatacaagactttgttcaaattcattgttttaggatataatatcacaaccatatgagttttttttaccgagagattacttcattagccacttatttcaaatatgacccttaattttacatatagatccctaattattatcaagattattgcagacaggtcgcccaccgaggttgatagtgtgagagacatggccccacttggctcgcgctcgccgccgatgagctcgccatggcgcgccgcatcagacctcggaggcggctcgcacgcgccgctccgtctcctcctaccaccacctcgtcgtcgtcgccctcctccgccgtctctccgcttccccccgccaaaatccaccgaatcccataggcggcagccgggactggacgatttgagccgaatgcgctcgaggtgacgccccccacacccttccccgatcccctctcctgctccatggttgcttcgaccagattcgagattaccttacccatgattagcgttgatgatttgctgctgcagttgtttcaaatggtgacgaaaaaaaaaaagatgatgagcacatgattggaatctcgtccgtggttcagctgatcagttccttccatatatttgggggaaatgtgtttttttatcgctgaaatgtggtaagaaatcaatcatgaactgctttatttatcttttttttttttgaaattatagctgcaatttgaacttgtgctcttttttgaaattatctcaggtgtttattgctcccttccctcacctgcaaataataaattggttgaaagagaagagttcagaattgcaaatggaattaggttgaaccgtcactttcctgtaatttaatttgtacggtgtacttatacattaagatgttgccaaaatgtgacaattgcgtagggaagatgttgacaagaacatggcggcttggctatacgaagatgctgactactttgttcatagtttagtcatccgcaacgtgaatcaggcctgcgaatctgagacttgtttaactcaaactcctccagattcgctgtattagaaccgttgaattgaatcaaaataatactatgtaccaaagcttattcttttttatgtcttttcagtgctaaactaggttgtagtggagtagtaggatgccattgaaatttagattattgggagagtataatgcccttttactcgtcatttgttttctgaacttctggtaccaatcctgatttgtgagggtaaaattggattaccaaacatctcctgggtttagatggttactgattgtgagcaactccattagaatttggtagcttcttatttcaaagtgaggagattgaatgattgattgcggtaacaacttcttgtttctcgccaggcgaggagccgatctgaaaggaatatgaagtagccaatgatgatctctatgagtatatcctttcttcagattaagtatgtataatgccattgaaatgcttagcatgacacttgagattaagtactctacaggctacagcattgaagcgattagcatataccacttcttcagatcaagcatacaccattgaaatgcttagcatgtcacttgggactcggatacaacatgggaatgcttagcttgccacttcttcagattaagtacacaccattgaaattcttagcatgtcacttcacataaccataagaaacatgaaaaccggagtacatacacaatcatagcaagaaacatgaaaatactggagtacatgtaactttgcacgggtccgaaaaggcagcagaaacacatgcagcagagatgactgggctgcacctcctgcacagctgcactgccagaacggacacactatccatcactgcgccgggacagaagaacagcacgcaatctctcaagataatttcccagagagacgcaccccccacacccaacccaaccttgcagaagattcccaattccaccagagaagttgcagctcccctctctctgcatgaatgaatgaatgaatgaattggagagcagcagcagcagcagcagcagggccaaaggagaatgggaccattgcctgaccaacaccagcagcagcagcagctcaggcttttcatgtgctggagcctgcctggaacagcacaagcgacagcagctaccatcaaccagctccatcacaggagcccaccatgtttttgatctgccacacaaatcactcaaagatcaaagtaccctgcatcctccccagtattccaatccagctgatctgtgtgtgatcttgtacactggtactatcccccagaataattcaactgtaaaccacacagttggcacatgaaatagtagatgcgaaatcgacggcttgccgatcccaataccatgtgacaataacatattcttctttatgtttggacaaaagaaaaacactatatatgtagtactgctcaaccatgttagtatcatcatacagtgatggaactagaatagtttaccacctccatgtttgatcatggtacaggtacggagctaaaatattttactgccaccatgttagaacatgattagaaacaaaatactacagtatatattgtacaaccaccacaccaacttgaccttattgcatgcactaaatactggaattttatcaggctctgctcatccattcaaatctatctccggggtggtggtcagatatttatattcttcgacagcttttcagaacatgttctcctgaaggctgtcactggcttttagcagaatattctaaccactaaaaatttacacctcactgatcagggcatccagctcaaaatgtagggaatccacttttcatggaacaagttcaaatgtccagctagtgccaatcggctactttgtctcttccttatctatctctgatggaaaaagaatcttgatctcgcagcatatattcccacaacaggttacaggttttctttttttttctttttataaacaaaaggaacccaattccaactttggttatgagtcaccgaatgtgatatgcgtcaaatcataggaacggtgaatgcgatgcttcttggagactttgaatatttgtacagtgagaaaagtgtcttgcctgtgaaaatgatatgattgataaaaagaagtccagcatcttaccaaaattatggatgaattatgcataaatagcactctgcactgttactataaatcctgaagcaatacttgaaaccaggaatttttacttccataacttccattttaagcagtataaagaggagcatgcgaattgttagacaacaaataaagctgaatagaaaccattgttagtttatggtgaaagctggatctatcaagatacccacaaaactagaccaatcaatggcctgacatttgaactaagactaggtcttgtttaatttatcaatgatttgtactgtgtttactatttcaggcagcgcagccagcatcaatccagaggaaaagcacatccctacaaatagatacatatgcaaatatactagtactagcatggatgcaaaaccgttgagcatcaaagaagcccattggttcaaagttgtacactgtgaaggaatttaaaattatctccagaacaagattaatgcattttggcccggcaaaacagatcgatgcttttttttcaaaaggaaagccagctgctttttgatgtagtaaatctatcttcccgccgttgaatcaatccatgaattaaatacttcgacaggccattaaagaaaagagttaaacctgtaaacttaagaaagtaagtttgaaagtttacctcaaaacaatttacaattacaacataaattgaattagtcattttcataacatcgataaactagagacaagtagttttattgcactattaattaaattactcagctatatagcacaataattcacttacctaggtcagtagataaactagataagtcccaaagttgtttgaaacactaagtcttttttcgcatcactaattatctccggtctattagctttatcctcggaattagatcttaaaatacgagaaaggcaaacttgcaactagtaacctgtttgtttgaccatggctaaggtctatattagcgataagcatatgcctctgttaggccaaaagggcatgtagaaacttgtagccacacacagcctctaacaaatagcatgcatttagaatcaaagttcttaatttccacaactgaacagagcaagggcaaggccacaccttattggtggcactaccagaattagcatatgccatgaagaccactatgcagactacagcagatgtgctaaattaagcatatacaggattcagcatgaactcatggtcacagatcattataccaaaatgaattcaccataatttcaaccttcatcttaattagcaaccatgatagacccgtactagcagtggtagattcagattaacaacatccatatcaataaatgatacccacagttcaatcaaagcatagatcgcaaataaacctcatctacccaaaaagacaatgagattcagatctttttcccgctaattctaggtggcctcccctgaaaccatactcctgatactgatacgagtaccaaactcaggatagccaccaaaaattaggggaaattccaacttgataacgccgacacgaatcatagatagaataagtaatcgagaattaggcaccagatctagatctgaaaaaaaaattaaatctaatacaaacgcgtacgccccacacctacgaacacgaacacgaggaggatcagcaattcgatccgattcatcgctaaccccgtcccgataccgacccagaaacgaaggagagacaataaaaacaaccaagcagcgcagcatcggcggcggatcggcggaaggagggcgctacgccggctccgattcacttggtgcaaggcgggatccggccccggcagcggcggcggcgggtcccgatctgcaccaagcgagcccgaggcggcggcgccatgagacgagacgagacgcgcggtgtctctctcgagagggagacgaggtggtggaggagacgtggctgctacggcgaccgcgtcttcctcgcggtggcggtggcggtggaggtggagatgaggaggagatggggattttatagcaggggggggggggggaggttgggagcgtggttagggattgatgcgtgagggagggaggcgatgaggaggtgggcccccactagaaaaaaaaagaggacgtgtttagttccttcgcattttttttaaaaacatactaacacatttaaaatattaaacgtagactaataataaaataaattacagattctgccaacaaactgtgagaaaaatttattaagcctaattaatccgttattagcaaatgtttactatagcatcacattgtcaaatcatagcgcaattaggctcaaaagattcgtctcgcaatttacatgcaaactgtgcaactggtttttttcgtccacatttaatgctctatgtatgtgttcaaatatttgatgtgacattttttgctaaaaaatttttggatctaagggtgtgtttagttcacgccaaaattggaagtttagttgaaattggaacgatgtgacggaaaagttggaagtttatgtgcgtaggaaagttttgatgtgatagaaaagttgaaaatttgaagaaaaagttgagaactaaaccaggcctaaacacaccactgtgtgttgtgtgcgcccgcggcggcagcgtcttttctaccgcaccgtcttgttgtggtagaatactggtttttagctcttactctatcaagtttaataaatactagtggagtataaaataaattgaattttcaaattcttagaaacattattcgggttttatcggttttcttacatcaaactagggaataagaccacaacaccctgtcacccttcctcgttccttcactctttgcctcatcatcaccatagtgattttttttgtcggtgttctttcctctctcttttttcttacttttccaaggctttgtactttctcccacactcccgtttcgtttcaaaatatatacatgatgatgtgtatcttgatagtacgaattcctattatttagacttgtagcattagggtatatctcatctagtattatgtggttgtattttaggatgaaaaaacaaattttgcttcaagtcttttcaattacttattttatctttttatattttatttatatatatttgttttacaattgtcaggtactccctccgtttcaggtccccatcgtttggcttatttcctaataagctaaaacggcttattaggaaataaaaatgaatttgtaggtgaaacttttataaatgtgttattggtgacttaaaagccaatgttgtaaaagaaaccacgttgaaaatatctcaaaattaagtttaaaaattcaaattttggctttttctttggcttattaggtcatccgatggaagcctaatgtgattgtgagaaatgttagaatgacttacattgtaaaatggaggaagtagtaaagaagaagatgatctaacataggtccgtcagtagcatgttgttcattactcgaataaggtgatggtgatgtgtccatgagaagatatgctcgaataaaaatgggctaacggcgtcatagcaaagaatattggaatggtcgtatggcgattgtcataatcacatcagttagggctccttttaaacacatatggaaaaaaagaataattataaaaaaatggaaaaaggatgtcaggccatacgaaatcatgcatgaattgaaaacacacatgaatttatcctattggtggtccggatgttccagaagaaatccacatcaattttagagaaaaaaaaatatcattgaagtaaagttaaggggagagggagatggagagatgttgtcttgaaattctctaagttaaaaaggagtataaggtttgaactcagtctcaaaattctcaaaaaaaatgaaggaatggaaggattttttttcaagtaaatccaagtaggaaataatcctatagaatttgaatcctttaaataacctataaaaatccctcgtttcaaaggagcccttaagtttagtgagaaacgatgaaggcactctgctagttttctagccgtcctcatatctggtgaaaaccttgtggcgactggtcttgctcttctatgatgagatgttggagcttgcttaaattggagtatgtatcatggagtaattcatatgatcgaagtacgagctgttcgatagaacaatcttgctatgctagtgaaatgtgacccgggtagctatttctaattatcccatcctttatgagtgtgttttggttagaatttagtcctgacctcagctaggatagctgcgcaagtttgattactttttaaaaccgtcaaattaggtaatttgaactttgaagaaagaggaagactacagtgattgatgccaaagggcgaggcaacatggagtagtacacaattgggtgagattgccagtgattttcaacttatactaggaaagaaactgataatgtttaaggctcatttacacatacaacataagaattctataggaatttcacatgaattagttgaatttctaagaaaaccctccaaaactcctttgatgtaaagaaggccttgtactttttaagtacatcagcaagcccataccatttacatcagcaagcccttaccgtttgttcctttgaagtctattattgtgtctggcctaacttgaaaaggatttttgtactgcaaagtatgattttgaaggctaataggacttctagttctagaagccgaataggactcgcatgccaatgaaatgtctagtggcaaattcctctgttttatagcgagtagtctagcgtcgaattctgaaccaacaatcctctagtagttagtactaccttaaaataattcctcggcatgaaattcatccaaaaaaacaaatatctctattttttcactctattcgaagaatcgtcgtgtcgttaaaaaaaagtaggacgtgttcaagaaaagtcaaaaacccaaaatgtttatggaagaaaaagagaaaaccaaaagaaagtattctagatttggtgcatggaaaaatcatactagtaatctagatgcagggaatagcattgtgtttgtggagagaaatgtttgtgaggtagaaggggcagcattgaggagaatcttgttcacatgggagatacaggaattccttgtgggcacctcaccttgagagattggaccaaagaataaagatggagaggaaagtgggatgcttacgcctaccagcccttgctttctgccatctgtggactcatctgcctctctcacatgaatggagcaaaagaaaatgtcatagattacacatggtttcctttggtttggtctttggacacatgtaacctaaatattttattgtcagaaaaaataagtgagcacttttgattctttgtgtgattcgtggcaataatttcttggatgtattgtaagcttggatgtgttcgctgccaccgcaaacagggaacatctccttttttttttcattcattcttttttattattagagttgtattgcaaaaaatagatgccgagaatatgtttttcctctaatgattttttttcaaaaaagtggatgtttcatttcattagtaagtacctttgtagataataaatactatgtgtgtcaaaaaaaagtttttacttttatatatgaatctaaacaaatgtatgttcataatcgtatctaaaggtaaacttcaatcctgtttctaaaattcgaaccaaattactgtaagtactaactactaaaagtattagatggcacttgaaaatactggtggtataattctatgtgatgaagggttaacttcacttcatacgtatatgtccactttcttttgctttgccctcaattttccatgtgagtttcttttttttttaagaaaaaaggtgcagtccagcttagatggatcgatctacagaacagtgtgcatgtgattgtagttgagtccctctttcatacatgtgagtgattttattatctgatgaaaaaaaaatcatgtgagtatgactacctttgtatcgagtaatttaagcataaaaacggccgttctaatcacaaaagggcaaaccagaaaaaaagtgccatggctagacatttcggatagcccatattctggcccttcctgagaatgcttggagaggcagagaaagcaacagctaaacaggcctgaaactttattgggccaataacatccccaaggtccatgttctgccgcgaattctagcccatgcaggataagaaaatactatcccctcttgtcaataatatttgactgtgtacattttccaatttctacttttttttatttttcagatgcatgctttctgaacagctaaacactgtgtttttcctttaaacaaattatataataaaattgttttaaaaaattatattaatctatttttaagtttctttagccaatacttaattaatcatatattaatccattgttttgttttgagtgtcgggaggaaattttgctagcacatcctaacgaacacagccatgtttaaagcactgtactcacaacatcaaatattatattttctcggttctattaagatacataactacttgtatcttgccaatggtacgtgatgtccaactacagaggctgtagagtgcagactagtagatcacttgaggcgatagagaagaactacttcaaatcatcagtcgaatatgaaaatggagtagtattcgtgcaaagcacaaaagcaaaccatgattttgagtagaataaacaacatgtaagtaagggcattcccaacctaatgactatgatggtgtccatagcattaaataagttgccacctaggacaaaaaataatgtggcaagtgaataaacgaggaaagagaagaaaatcatgtcttgcatgagacatggtttctacacaacatctaaaacatcatgtgagataagtagcattaaattgaagtatggaatagtggtgtttgcattaaatagcattaaattgaagtatggaatagtggtgtttgcattgaaagagtagtgtactagtttcttgatgatgtgaagtttatggttgggattgccctaatgaatccaccaaacaagtcatgatttcgagtagaataaacaacatgtaagtaataaatcacctcaactagtaccaatctccccaaaaaaaatcaaaagtcaaacacacatataattaggtgaacagcgatgttacaaattcgatcaaggattacagcgcactagacaggagtaatccaaaatccacctcaattctacacagatctctctctctctcttttcaaaaggataaattctacacagatcttcttaattactgctctaaactacaagcgacatttcaatgtctccgcaagagaaaatcattaacaccaagaatcaagcaacaatctagctagcttgttctcttctcatggcgatggggatgagacgagcagtctggcggcggcgagctcgcgggcgaggtcgtggacgcggcactggtactcccgcgcgagctccaccgcctccacctccgcctcgcccagctgcacgcacagccgctcctcggcctcctccgccgtctccgcgcgccgccgcgccgccgccacctccgcccgcagcgccgccacctccctctccagctccgcgttccgccgccgcagctcctccgcctcatccttcgcccctcccttcttccctccggcggcggcgattccgacgaacattgccggcgccatgggcagcttagctagcttagctcgagctggcaagatcgaattcgcgccgcagctaatcaaatcaaatcaaagcttgttcttcgattggttgatctggaagaggggaggcggtccgtggtcgtatttaaggacgggttcagggacgggaaggcgtccaggttcaatgaacctgggggtgtgaggacgggagaggcgacgcatcagcagtggccccaccacccatcgtgtcctgctggtgacttgtgaggtgaagaaactgtgaagacacggatggggtgaggtcacggtgatcgtgtggacgacgtggaattttttttttcttctctggggatttgaatggtttggagctttggactcggcaactcgccggtgctttgcttccaagcaattcaaaaacagcgacaagcagtggtgggttcacaaagcggacgaaaaccggtcggttttcgcggtttttcgatatagctcgaaattaattttagattggaatttcgaaggcaaaacggtaaatttggtcgaaattcaatcaaaatttatcgaaaaccggttgaaatttatcgaaaaccatgatactgatggggctcgaaatttagtggtcaagcggtaatgtaaaccctataaggcacaaccgcacaaggaaaatgaagggaagtacgattgtatctggatggaagccaatgttgaaagttcgaagtaactttcaatcgtagggaaaaacgatatctgaacgtttatatatttcggaatggaagagtaataggggtagactttatcttatgaggaaagaaaattattggtaaagaaaaaaagctgtaagacctattcggtttagaagaaacttattccgtgaatgaacacttttcttgacatcaggatcattgacgctaatctttctacatctcgactcctagggaagcgagggtattggtggtagcattggtggcaccgagacattagacctcgacgccttctaaataaatttgtttaggggtcaatttataaaataagttttttttaaaaaaaactaaatgtaaaaaataactagtaagaatatatgtccacaccaaggaccgtatttttttcacctgatccaaagacatttgttttttctttaaacaaaaactaaatgtttcaaacttgcaattaaagtggtgttaaaactaaaatgaatttcacaaaactacgtatacttaaatcaaactatcgcaaaaccacaaatttaaggacgtgtatcacaatactacatatttagcatcaaacttttcacaaaactacatattcaatgtatcgtatcacaaaaataaagatttagttatgaagttattaaagaactatagaatttagagtttatatccatagcactattatgtatataagctgtagttttgagataaaattgttgttaaatttatagttttgtgataggacaccttacatctatagtttcgtgatagtttcgtgataaatttggcactaaatctgcacttttttatatgcatccttataaacatgtattttttttatcaatgtagttttgtgaaatttaataacaagaaccaaaacaagacccatgtacggcccaacttgtgcccccggcctgcattctttctccattcgtagcgtaggccgtgacggcgtgtcgtccgcgtgtgcgcgcgatatctcttccaacttccaaaggcgcacgccgcgccacggcgagccactcgctccgcccaccaccaccacccgccgccgccgccgcaaggctcgccggcgatcatgctctccctcctcctcccgcccgcgcggccgcgcgccgccgtctcccccgacgtcaccgcctcggcgccgcgccgcccggccgtcatcctcccagttgcgcgcgcgccctcttcatctcttctctcccttcccgttcccgctcgtgggttcgtgtttcttccatccgtgacgaggcgcgtgtcgtagtggcgcaggggctcgggaacaacacggcggactacgcgcggctcgcggcggcgctgcgggacgaccacggggtgccggccgtcgccgtcgcgcgggtgtcgaggcccgactggctccgcaacgccgccggcctcgtcgaccccagctactggcgatgcaacctccgcccgcgccccgtgcttgactggtaaacgcgtactcaggcttctctgcgtgtagatttatgctttgaggcatttcatcgaacaccttgcctacttgcttgtttgcttgctatttcaggtacctgaaaagagtcgatgaagctgtatctgaggcgagagaactatctcctagtatgtctcccacaggcttattactcgatgcattggtgatttactgtctactgattagtgccccaagaactgatgcattgatgaactgtttctactcaattaaattgccatggcccatgagaaggagcataatagtggggtttaccatctagagttcggttgctagggactaattttgctgtttatattttgtttcaaattgccccctttgctttcttggagaagaaaatatcccctttggctatgttgctcgaagaatcatcatgttgaaaataatggaataaaaatataaatcttcaaaatgataacattcatcataaatctgtttgcaacttgcagatgaaggcatatcattgatagggcattcagctgggggctggctggcgcgtgtgtacatggaagaatttgatgcttcagacataagtttactgctcacacttggcactcctcacttgtatggtttcctacctgattgtttgacacttaattaatacctgattaattcttgttacagtttgacaattcttgtagtaaacatctagtactcttatggtcttaccttatagatgtgaaattatgttgtattaatacacagaacttgttgctgtacttgtgtgttactccgtatcccataagcttgctgctatcacttcataataacattttgaatatcaaaagcaggttagaatatccaaatcatacgtttctttgatgtgatcttcttttgtcttttccttagaccacctccaaaaggtactcctggggtaattgaccaaactagaggactactgacctatgttgagaagaattgtgccccagcagtttacactccagaactaaaatatgtgtgcattgctggaaggtaaatttcttcaagcttgggtttcaggttctgtttagttgcttccgtatgtacctttacagtctttactatagaagttttttgagttttgcatttcattttatctcctagaccaatcaatactactgatacatttcattatggatgtgtggcaacacaagtagggtaatgccgcagatattgctcatacttcactgctagctggctaaaattctgcctgaagtttagtattaacatatttttggctattttgattaaacaattgttctaaataaactaatgaactgggtattagcgaccagcaaaatcagtacctgataacaaaaaaagaaaaatcataccgtgtcagtttgtctccacaggtacattcaaggtgctcctttaactgggaacaccatcgctactacagatgatattctcgctgtggatactccatcagatatagctgaagcagtcatggtcagtaccaacgacaaatctactcaatcaggcccaaccttgagagcccgcttcattggacaaggctacaagcaggttctgaatgtgaaactgtgaaacattcctccttcctctgctttctgaatgtgagcatgaaaacaacacccaaattctcaaccaggtctgtggccgtgctgatgtgtggggagacggcgtcgttcccgaggtgtcggcgcatctagaaggcgcactgaacataagcttcgacggcgtgtaccactctcctgtaggttctgacgatgagcagaggccgtggtatggttcaccggcaatcctcaagcagtgggtacatcatctcctcagttgaacggttgatggctttgatgcagagaagctgacgatctgaaagtttgtagacagaaatgtattgcatgccgccaggtgagggttaggccaggggaaaactacacatttttcagtgaattagagggtagccaatgccattctatacacaacagtacaacacacatgcgatttttcttctcccaaagaatttgtaacagtataaatattgctcaatgtgcagaggtaattcatcacatacatgattgcaggttgtaatagctacacatacagtatgatctataacaaacttcattccaaagaggaataccaactcagatcattgagaatgaatattcacgtctcaacctagctggctctttgttccaaaacctgtacatgcaaataaccatccagttttccttttgaggatcaaatggccattgaattctgaagaaagcaataccacgaatgtgacaattaacatgcctgatcaatgaacacaagagcgcctcaaccaaaccagcatgcatacatacatatatgtagtatatgcctggtacaagatgccaatggcagattaaaaattgaaccacataaaacgcctgggatcacagtagtaggacgcaataaaatattgggagtgccttttttttttacatgcatcactgggaaccccggcctagatgttcaacgaagtcttttaagtcttaacacagccacatgacctaaaacctagtggaaccttggggcctaacatggatcacaaaagaagcatcccaacacaagtccgagcagtaagcactaatacttgctccatatgactggtttagttagctttaatgaaatgaggggacagcagcttggcaatctccatcatcccgaccttgtccttcccggcgaataagcttttaagcttatcgtcacagttaatctcccttttgtttgctgggttctgcaaaacatcaagcacataatctcatttcaggaacaaactgcttgcagtgaaatctacggcacatgaagagttcagtttagtacagcaaatgattgtgacacaagtgtaatcaaattaatttatataccatggtaaactagaaaggcagctaaagtagcatatctaaaacacggctaacactgctgcaggtgcagagcagacattcaagaacatgagttcaatcatgcctataacaatgtacagtaagttaataacagatgatcaaagaataactataatgcacgtcacactatatataaccacacaacagtgatcagcatacattctggacgccgtgctccacatcgctctaacagtcaagttacaacttcagtacaataaaactaatccaaatctgccaaataaaatgcaccgctgtcaaagtagattactgctcagcaaccttagcacatgtaaaatgctagaaaagaactttattgggtgcaattttgtttttattcccttattgacacccccccaaatagggcagcctttccaatgtccaaccacattaactagattatggcaacacatcaaatatttatttctgaaatagaacccagtagcttacatacagtgctgccgaaaatacatcaaagccttgcgaaaaaacagagaaactgactagaaactttactgaagtttcatataccacttaatagatccaatagatggcacgtgcaaatccttttacagtagcacaaatttcacaaatgaaattataaccaatcccaccaaaatggggcaaaacagtatctaaccaccacgaagctgtaaccaaatccgcggaaatgggattcccctctcctaaatcaatactacttgaaccaaaccccacgaaatcgatacttgaaccaaatccgccgagatgggattccccctcccaaaacaatactcgaaccaaaatgggggcaacagtatgcaatagatattccttcgctagcgcaagcgagacttgaaccccatggctcccaaaccctaatccaacaaaatacaaatcgcaacgcacagctagtagatcccacaacgagcgctgagaacaacgagagccgcggctgctgcaaaatgaacatgtgaacagtgacggggaagaggcagtagggctgtcgggggcgctcacctggaggccgttggccttgatgtggttccagatgagcttgacggcgccagcacgggacatctcgggggcgccgccggcgaacctgctgagggcgtcggagaccggcacgggctgcatgatccctcgcttctccttcgcctgcgccgcctccgtcttggtcaccttcgcccccgccgccgacgccgacgcggaagccgacgcgggcctcttgccccccgccgccgccatgaggaacctgcacccgcggaaaaccctagccgccgccgccatgggaggggaggagccgccgcttcaaattcgcgcttcgaggaggaggcgaggcgaggcgagggttttggggtttgggggttgtttgggttgcaactccactgagggagcattttgtatttggaaaattttgggggccaaccgattttttcatctaggtcctttgtgtttatttttcgttacaaatatgtccttcattgtcccgctgcgcagtggggccagtggcttttgttgtgcatccagatattccaggggtatatttataatttcgccaactactaatgcgaaaccaaccaagcagggtgagacatattacccataaaaaaaagagcatctgttttttttatggcctctttgtggcaacttaaaatgtggatcccatgctggaaatttaactatttgtcactcttgtgatatagcaattaacgatctgccactcactatctataacatgcggaccctcatgtgtctattaacgatctgccactcactatctataacacgtggaccctcatgtgtctatgacatgttggcctagtggcaaatcgttaagcaccactcgtaagagtggcaaatagttaaaagccccttacaaggacacagggattttataggattttttttgtaggaactagtttaattctcgcgaaaattctctaatccaaaggagggctctggtttgtcattccatgtgtaaactacgttttatctaagaaagaactaaaagtcttgtaacaaaatactgagagactagtaattatcaggaagagtgtgatgtcatatccatatggagaggaagaaaaaaaattgtgacatatattcaactgaatcagattctttgtcgtagcaaaatcacaatgtttgggacggcattatcattattttgattggtacagtttgacaacaataacacatttggactgagcatcacacgtactcaactttctctattgtcaccaactgaatgctcaaaattttgttagcttcttcatcttctgttcttcaatgtttaacagtctttcttttctttcatgagctactcgaagatgggtagatcaagaggcttattctttgacccatcttgagtgtctcttgaagatgatgagagagagagagcagagaaggcttttgtatcagattctttatccatgtccaggaagaaccgatgcctatcaagcaggagcagacagatccatgagcatcagagcctaaacaagatgcatgaaaacatgatatggtatgtaggaaaaggcactaaccatctagagtctgatgtcaattctgggtgaaaagcagtagcgaggatgttcccttgccttacagcaacaattacccgatctttcgagtacacttcttcctgccaaagtattgtattgaacatcagtgcacagaagataaacagaactttcaattagactagattcttcgcacaacacatcaatcggcagaactttcaattcgactagattcctcccacaacacattaatcatcaatatacatttgaactagacacggcagggaaatcagtaaaaacgtaaaacagtcaaactgacagggtatggtcagaaaaacacatctagtgcagcatccagaaaaggagaaatatcacagtacaaatcagaaaggaagtgagcatgtatatgcacttgcaatctaaggaaatgtccttaataaccaggagatgaatttagtttgagaatttgtccaaatacaatatgttcagtaattctcttctcatgtgtcattcaattgaaatgatcaagaattatcatgttcgagaatgatgatactagaagagccgatgggggagggcatatgaggacagtaggtgtaaatgtccacatcaattgacagagtttatcttggaattgttttccctaatagttatgatcagacaccataattactacagattcaaggagaacagatagtgaaagggccacacaaacatgatactagctaatgctgcctgaacaacaatgaacatggcatgaacagaaataactgttcatcacgcccatccataaatcctgtctagtttcaacaacaaaattccacttttactgaaagatagcatatgccatgatcatttgcagaagagtgttggaattttcaacaggggtaaaaggcaaacctcaacaccctctccagacgctattgtaatactgggtctatccgatggaacaggacaatccgccagtacttcaacatttgaacctacatccaagatagcaggtgctcgtataaatacgccacggcatgtatcgctccctccttccttctctgcaagcattggcactgaaagttccgtttcaaagctttgaagctgcaagagagtgtattcatctcaaaaataaaataaaattgaagagacaatagaaatgatagtgaaaactgctccggccatcaaacagagaacacgatcctcaaagttacctggctcccaaaaaagttccggtggacagtacaatctagtcctccaataagctcctgacctccggatttttggcctgcaaataactttcatcaattgattccaaagaaagaaagattaaaccaattgctgtggctcacatacctactgccttgttagctaggaagatgagtccagcacaagttccccagacaggccttcctgtaccaacaaattctcgaagtgcaggaaactgcatggtagatgaaataaatcgttgcaacattgtgcaacattaaaataaggtaataaaaaactatgagttataaaaaaggttaatatataattgtattcatgcagtacatgaagactcaatctccacgaagtagaaaataatcaagtacgacgggtgtgaatctggttcttatgaaaaggggaatgtactcgtcatctcatctacatgtgaaactaattgtacacttatatggatgtatactaaataatagtatgtgactagtcacagtttcacaatactcagggatggcggatacggacgaaggaatttaccttaccagcagcaggtagcaagcactggtctacttccaccagcaaagctgtcaagtctacagctcatcattccttatatataaaatgttggacaaagacattcgcagtttctagttatggccttgtaagcgaggctaaaaaacaacgggaatctatatctgcaacaagttgctctgatggagccatgggctactaatatcccataacctcatctgtttttctctagattagttattctgttctgaaagcttaaaagggatggatatgaaccataaattcgtataataggattaacaatagttctcgaacgtgcagccctttcagaattgtatactcactagtagtcagtaatcaacacaaacacataggaagaagagaagtctaatttgccttccatatattactttggttgatctaccaccaaccctcctccgtagtagacagtaacaaaagaaatgcacatatttggactagttttgaccaatgcaagggagcaaatcaatatttcatttacatggattattgtagtgtttcttcagtctgatcaaaactgggctagttgttcggaatgcaaaacaccgggtcacttttgagaactttcaacaattgcgacagtttattagtacacatatccctttcctctgttttgaggagaatctaaccaagaaggaaattatcactagtgcccaatttataatcctctcactgaacatcgatcgtggagattcatgcatcgcatcaattccaataataaacagatacaaatgatttgctaaaacgaaagaacagcaaccaaaagaagaatggggggagttaccaggttgtggtagttggcgagtttggccatggtggtgctctcgccgccggggatgatgagcgagtcgagcccctgcagctgctccggcttccgcacctccacccccctcaccccgatcctcctcagcgctgcacccccccgcatccgcatcaatcaacaaccaacaaaccaaaccaaaccaaaattcccaaaaaagaagaaaaaaaacagaagcagtgggcgcatacataccggccaagtgctcgttgaaggagccctgcagcgcgaggacgccgacgaccgccattgctgctgctgctgctgctgctcccctcctcttctctcgctcgcgttgggatgtgtggctttggctttgaattggggggtgggaagaagtggacgggagaagcacgttgccgtggcggcggccgccacacgcacgcgcctccacctccacctccacggagataggctaccgctgctgccacgagggaaaaaaaaaacagttactggcggtcggtgctgcgcgatcctgaccgtccgatcgtagcagcaggagcaatctcgagcgttggttgttactgccgtgtgtgaagagtggtgatacggaccaaccgaaggctttaccacttctttgggccgccaggtcgtacttgagaattatgggccatggaaatggaggcccacataccacattatcggatatactaaattattacagtatactccgtcaaaaaaacccatctaaaattaaaatgggacataatttattgtattcagattcgttgtactagattatgtttcgtcctacttttagataaggtctttttggaacggagggagtagataatctacctatcatttttctttgataatctactacgagaatgttgtaaaaaatgcacgaatatgcacgtcaagcataatgagatacttccttcgtttcacattgtaagtcattctaacattttccacattcatattgatgttaatgaatttagatagatatgtatgtctagattcattaacatcaatatattagaaatactagaataccttacattgtgaaacggagtgagtatataatactgtgacatttaatttacaaagcacactgtaacaaaaaggaaagcaccagtaggattaattaattataattaattaattactactactgtaattaatagcagggtcaaaagggcttcattgagcttaagccgatcgatcttagcattcacgcatgagagttcagttcagttcacagctcggtatgccggacctcgtcgtcgtcgtctttgtcgtcggggtggtagtcgtccggcgacatgccgccgcaggggctggtcctgaggcagtcggcggcggggctgacgcggccgtcgtcgaagcccatggcgcagttgcagacggtctgcacctcgccgccgccgtcctcgcggcgcaggtcgatgtcgctgagcacgatgccgacgcaaggcacggcgtcgctgcacgccagcctgatcgcctccgcgcgcctcgccgtcccggtgatgttccggaacaccacgccgctcacccgcacgttcgacgtccggttccggcacggccgcgtcgcgtcgcagtagaactggtcgatgacgatggggtggtcgacgccgtcgacgcgcacgccggcgaaccgcacgttccggacgtagccggcgccgccctgccacgtcttgatgcggacgccgttctgggcgcgcgcgacgcgggcgccgtcgagggacacgccgtcgacggcggcgaacgcgccgccctggccgaggctgccgatgctgatgccgtggccggggccgcagtcgatgtcccgcatgcggacggcgaagctgccgttggagatggagatgcagtcgtcgccggtggcgatgcggcaggactggatggtgacggcggtggagtcggcgacgtggatgccgtcggtgttcgggctgtcctccggcgagtcgacgcggacgctggcgaggcgcacgtcgcgggagcgcgacaccgtcaggtgcatctgctgcgcgttctgcaggcgcaggttccgcacgctcacccccctgcacgagtcgatggtcaaagcctgcacgtacatatgctccccggtcaaccgttaataaaaaatgcttgtgtactatttcctccgtttcacaatgtaagtcactctagcattttccatatttatattgatgttataaatatggaaaatgctagagtgacttacattatgaaacaaagggagtattttcaggggctgttcagattgatggcattttaaaccataccattttttttgtaaagttatcaaaaaatgtctacgtttagtttgttgccaaatttgataaatacataagaaaatcctgttaaaattttaacaatattgctatcttgccaaaatttgataaggtttattttaactataatctgaacagacccccagtttatattataagggtttgtttatatttatgccatttcaaaccataccattttttttatagagttgtcaaatatatgcatacatttagtttcttaccaaggtttagtaaatagataagaaatcctaccaaaaattttagctacaatctgaacaagccctaggttgttttgattttttttaaatggatttgttagaaaacttttgcaagttttttccctaaaactttcaaatttgtaaccatcggatcacctcgagatttgtgcatgaaggaaaaaaaattgctagaaaaaattcacacatgtcacgcataagatcctagtgcttgctaaccaaaccatagttaaatgtaagttttatataagttatatcgtagttaaagtgtagttataattaaactgcaattaaaaaacttgcgatagtttttttagtactccatttttaaattagtatattatgtttaattaagtttatattacaacatagacattaaatatattttgattttattcgtgttgaaaatattgtaatattttttatgaactttgtaaaaggttaactggaaaaaaaaatcaaaacaacttaaagtataaaacgaggtggagtaataacattgtgattaattaagtgattaatcctgcttaccgtaggtgctcctttgcatggctgcgagatgaaagggagagtaactgacggtcagtaacaatccagtgatcagtgagctaagctagagataattagtgaatgtttaattaccttggagcggtcaatcttgcaggagttggcccaccatttggagccggagccgtcgatgagaccgccgccctggatgcgggcgccggcgagaccggagaagaggagccacagccgggggctcgccggatcccactccgacggctcatctggcgccacgatagtgccctggatctgcacaaaatcgaatcatcgatcactgcactcctggtggtgtttgagatatttttttaagaagggatctgcatccaaccgatatatgcaacatttttaaaattagaaacttaacctatcgaacatgtaacttagctttcaaataacctaatatatacaacattttctaaattagaaacttagccctctagtacgtttgagatatattaagatgaaaataaagttagaaggcgcaaaatgagataatattctcttgattaatcgagttttaattatcacaaatttgaaagcctgatatatttaatattttaaagcagtttatatatttttttttacgaaatataccgtttaaaaatttgaaaaacgtgctaatgaaatccgatgtaaaatctacatcttaatccgatgaacttgcagtgtacatgatggattcacctggatgatcatcctgttcttgcagggcccgatgaacctggcagcgccgaccttgtagcggcggccgccggggaccaagaacaccgcgttgttcagcgagcatgccttcttccaagcattcaagaacgcctacaacaccaatatttgataattacatgcattgttcagaaaacttaacaagatagaatgtctggttaattcagaagaaatcgacggaatatgcaactggattcatcaatagatcatgtcgttagcaccgcacaagtgtacatggctactacttgcaatgtgttgagttaagtgaagcaatgtggctaagctagatcttgcgtttcttcttggctatctgaatctctcaacgagattttcacgccttcattaagaaagacgaggatacatttttgcaatctttaaggtttggaggatgatttggttaagctaagcaactgcatgctcaggtcagatgcaagggggaatctacaatctagtggcatcgctatcgaatcttcctttttctcagtctcgacaaagaaaaatatatcatgtggttcgcgtcatcatcagttgatcacatataaagtgtggcttcctggatttgtaaggtccaggtccctgcttttcttcccaacatccaagtggttgccctttttatcctcaaagtaattaaagatattaattgctccatctctgatagtacatttaatattttttttctgactgactctggtgctgtttgtttagaacagtgatcttttcgactaatactaatatggaacataatatatactctgacacttaggtcctatttagtttcatggactattgtttagctctcaccttttagtgttaaattaaccctcaaagatccaaacagataggctaattttgagctaatatgaattagccccgctcaaaacattagcccctccaaggggtgctaatggggctacttttgtgtggggactataaaaaaaacagctctctctctccttctctctcctctctttctactatctctctccaccttttagccttgaattaatccatggatccaaacatgtcatcctaagctaatgtttaacctaccaattcatgactaaacattagctcttaaaattagccctgtgctaatctttcaaacaaggccttaggccaataaaggaagcaatgtgaacttttttttgtttttttgtcatgcgtcaaatttgattaaccacgcgcactgaactttttagagtaaaaaacatcccaaaaacaaaggtgcaatctatctacaggggaaaaaacgtatgctttttgtgaagaaacctcgtgcaatgcgccaatgcaagcacacaccatctaatctgcatggatggatgaacaatggctagcacaatggagaaaagagaagatggtggctgttcgaattcgtgcacacacctccgtgtcgtcggagcagccgtcccccgccgcgccgaagctgtcgacgttcaccacgttcctccccgccggcggccggcacttggccgcccacgccatcacctgctccgcctcctcctcttcttcatcttcatcttcatcatcatcgtcgtcgtcgtcccaattcaggtaatcttccttagcatctgctccgcctcttccgttccaaagcttcaagaattgctcatgatcatggtcatggtcacctccggcgccgccgtcatcgccgccgccgccgctcgccgtcttcgccatggccatgatcaccatcaacgctactagcaccaagaacagcattgttcttggccttcttcttcttcctcctactgcctccattgtttcacttcacacaataataacagaaacagtgtagtatgctctccttggcttgggatacaatacgaggtgtagcaaataattttataggggaaacaagaagaagaagaaactgaagaagcaggagcaggagatggaggtgtggtgttctatgctctttttgtttttgtttttttttgggtggacttgaagtgcaagtgaataatggcgatgtgtgcgacagggcaaggtgtagtttatgctttactcatccatataccctttttcccttggcatttttttcaatcgatgcatcatttcttcttgtccttttggtagctatgtaatgtaagtacaaattaagatgatgatggtgattagataatgctttggcttgaatgaacaatttagacagaggctgactctacaaacgttcttgtttaagacgtgtaaaggcagcagctttggttgagagatttcatgtcaacttcccagttgcaaactcttcatgtttgttgcatgtggttatcatttgttatggttctacctacgtagtatcattattattttccaagaacgggaaaaagattagaggtccctttacgctagctttctgtaaatgttgatggcttaattacgtctgattctaaccaaggtataagctgcactgcacgaatgccatcagcagttcatgattaccaatcgatgattcaaccccatcttccaacttcaattggatcataggcagcattaatcctcactaggcatcgtttggaacacaggaaattttcttacgatttccacaagaatcaaagaaaaaaatcctcctttttccgcagttttcgcatcatcattctccatagcattgagatgtggcaagccacgttcgatgttcatgtgccattgctccaggtgccagcaatcatgaaccttacctgaacggcatgcatgatgcgtgcaacagtattcagtactatctgggtgctgattggggtgtaacttcagatgcactcatcctttccgtttgcacagaagcccctgctttgcctgcccactcctccttaacattgcattgcgtgtgctgttggctgttgcacatgctcctcacattatttctgtttcagcaactgcaatgcaaccccattagcatatcatctttgatcccttttgcttccggaaactaaaggggaaaaagaaaatactcattcctcagtgcaaccaggaaacatggttatcattgtaattgccactccaacgttggcaggatgataaccttttttctgatatggatgtgacatgtaacagcttctaaaactatatatatggttatcaagagactctggaggaccatagcttccatagtcccaatcaacaaatctacacaccatgtaagaatgacaactggaagggggggaggggcagagagatttagctttgtatatacggcttcagtgtaccactgtctaagctgatgattataaggctgttgctagctatgacatgttgatctcaacgctgcaactcttggggaagcggcagacagggcacacgtcagcatttttctcgcaatcagcacacaagcagaggtgtcgacacggcatcaccagcaccgctgcctccttcattctgcacaacctgcatgctcccagcccaccatcagccatgctgttgatgccgaggaggcctgactggaagaaaaccccaggcacagcattgacattctgactggaagctgtgttgtccacttcgctgtcgccagagccttccctggtgagattgctgctatgggctaccatctgcatgagcttgcttttcatgctgttagcgacagactggttgtgcagtgctaccgactgccatgactggacttccaatgcaacctgcctgatctgttcgttcagttccttgctcttcctgttcatggcctccacctcgagttctttctccttcagcttctttcctactcctcgttcaagggatgcaagaaattcaaccatctgcctctgctttacatctttcatgcacttaaccaattgttccacctgtgggaaaagagacacatgatgagtgtaaaaaacttcacaattcttgtagtttcacttggcacacagcagtaaggggagagcagataataatgtgttgcattggaaaaaaaaaacctataaaactttaatatgtgaattccaggctaagttactttacagttgatagcaactgatgactgatgcaattgccacttgagcctaacatatacagatcactccacataataaaaatattaaattcttgtgatcacactttatacagtattgttggatatttacagactatgaggaacttgacgacatgggaaaaaccaaggttgatgcattcggaatatatttggcaatgaggtggccttgagattgaatgtttccatggagagaatatagtcaaacagcaaaactaccaaatcacatttggataaatctgagccccagactattccaaaattactgaatggcatagagtttccactactgagtaaacatttttccataaacaagcactaacaaacatctcaaatttggtcaatgaataaagtaagcattgaatacctgaagtccgaaataacagttgaactctttgttttctttgtctaattcagccatcacttcatcaacaaaggatgccatgataggcaatgatgacatgttaccactgccagatgtgattgaagtgtgctcattgttctcataggacagtcttagcccagttgatacagcacttggattaccaatacgtgctaaccgatcaagattttcaacaggaaagtagttcagggacatctgaagattgagttgcttttcatgaccaacatcgttgtttgtatttctttcttgattcatagcagagaggtggttgtttgcaatgtagttataataaccagtacttcctaccgcaggaactgcatagatgattaaatacatataaattagtttattttgagcgtaacagctgaaagataaaaaataggtgacatggcaagaatacagcagtacaccacaggccaaactactacaataggaactacagatgcctccgtgtataacggaaaaaactagagagcaaggacacaaagtgataaagcaaaactgccagtcccacctatcaacgaaacgtgtaaagagaaaaaaaagatgcaacaagagaattattttcactgtcaaatgagacttaaccatcatccctgttggaccaaatgtggttcctctaggcaccgcacacaccatcataggatgctgcacaaaagtaatcaaatccaaacacaacctaatactacctccatcgctaaatatattacattggttagttcaaaaatgaactaataaccaacgtcatataaaaggaacagagggagtagtttggtatttacattatggtggatgatctctacttatcctttaggatgctttagaattcatgagacactagttggagggtgagagcatgaaagcacctctccacaatttaacctactgggtagtgaattgggacaagatgacacggtgagggttaattatcgctgcaaatcttaatgtgctaatatcctacagtgagaatctgcaagcaacatcttaagggcacatacaagtataacacagtttaacatgtcaacaagctagatcaataaatctcacattagagccatcatttttcttttatcctaatacaagacaaggaaatgaacgtgcagattccatctggcacattattgagtagagaaccaaaatatctacccagcaatgctggcttagtgctcaacaactcaagcagtgaattcaattgcactaaatctgaaccacatatgcttaaagacacacaagcgattgcctccgtgaagctaaccaactagatcatcctaccaaagcgcaccaagcaaatgcaagacagtaatcagcgctcgcatcaacagattcatctcacctgcggcgctcccgaagagctgcagctgcagcggcgaggccttggcatcaaacacgaactggctctccttgggaatggaggcgtaggggaaggaaccaccccagtggccactcccgaacatctccccgtccatcctgctcctctcctgccaacaacacgcagaacaaaacacagcacaaatcacgcgaatcccctccaaaataatccgtgccaggaagaacaaggacccgacggattacccccgagacgacggcgacgcgatctctcctcgatcagcgacgaacccgatccgatcctgcgaaaccgtaacctcgtcaatgcgatgggggaaaccagagacaggggtcaaaccacgcggcgcggctgcgggagaatcgcggaagggaagctgaccggagactccgccgactcgacgcgccgccgccgccgccgccgcagaaaccgccggcggtttagggttggggaatccgcgagaggagcggcggcgttgggaaatccgcgatttattggtattttttttccttttttttatttttatttcaccctttcgctttgctctctgcttggttggtttaaaaagaaagaaagaaaccgcaagtgaagaaaaggaagaaggtgtgccagagtgtgaggagacggatgggcgggccttgattgttggctcggcccatttagtttcggtccatctgtgtgtcactacggcctgttttaggttcaaggtgggcccatgcatcagccaccaaatcagcccaggaaaatatacgtgtggcccatgaactaaaccaaacaagtagtcatcatactacttctcctaggcagggttacaatctcgattagttagcgaattttgagccccatcaacacattttgaaccatttctacaatctcgattaatttcgaaaattccagccgctcggaattcgttgagattgtgaactctgcttttatgtaattactttatttagaattacacagtacaacgcaaacactcacaacgcatttgcactcacccttataaacacacgcacgcaaaccctacccctatgagcatattcgaagattgggcctcgctgtcgacgggtacgtcgcctaccaccgaaagcaacaccgttaaatcttggaaaatttgctcccataaggagtcaaacccaggacctcaggtgctactgaggctcttataacctctaggctgcagggcctttcgcctatgtaaccaattttgttcctctggaaaaaaaagcaaagcaatcttcttatgctaattaagggcctgtttggggagtgtaagattatgagaagcagatggttggtagccagcttctgagaatctggaaaagttagatttcccaacttatggcttctattttattttctagattctacaactacagtttcttagaatctagaccaaaagctgaactgtttaggagaatttctaattctaggagaagctgctgcagttagaaactccccccaacaagccataatcacaggtctccatctctttaagtaggtgtaaggagacgtaatctacatatagtgtgtgtgcgtgttcgttttcatataaatcgcgaaaaaaaattcgccgggccggttttgccggccaaactttgtattaagaagaagaaaaattcaaagtcggtataggaaaaagaaaaaatgacaaaaaaaataaccatagattaataaacctccatgcatttacttacaagaattacttagacatggcttgttagtgacgcctctgaagcctgatcaaaagtgtacttgtattaagctggtatattagcacattggtacgtattattctacctttgggggtaggattaaaaaaggtgccctccactgcactgcagctgcatcttgggcaatggaagaaagtaactttggcaaaagatcactgcaagcctgcgatgctgccgtgttgtttgcttgctgtgtgtgacatgtgccgcaagcagcaaaagaatggacattttggtggccactgctgctgacactcatgaaaaaaaaaagatcagtgagagagagaagaagaggaagaaaattacctgcatttacagagagagaaaaaaaagagatcagcttttgaacacacaaggaacaatccaaatgattcgcttaactgtccttggagatgagcttgatgaggggggccccaaatgagtttagtgtttactactatttggttaatcaggtcaggattgtgttcttctttggggctagtaattaagtagtgtaggatttgatgattctcatggcccatgtagaacttttccatgtctgctttatgtcccatgaagtttgacctcggtttgtgtattgttctgcttgctagtactactagcttcaaaatcttggagaaatttcactgtttgggattcagcgcctagtctgaattctcctcaaacatacttgagtatcttggagatcaatctggcctacttagcataatagcattctcattttgaagtcgaaccatctctctgaaaatctctgaagatgtaactggctaactgcaagtctgcaatctagtcatatctgaacatgaagcagcagcaattaacaaactgctcatagaaaatgacctgcataacaattaacacaaactagttagtacaaacactagcacacaaagagctagctgatgatctgatcatgttattttaatccgggcccaaggaccagctttgctgaaaattcttggacagcacgcagtgcaggagtaattaaactgcatgcaatgcaatgtaatggcgatgcttttcccttgtcctgaagaaaaaggcaacgtagaaatgaaatcgcaagtgttgtagagtgctccccacatcgatcgatctgctctgattacgagagattgctagatgggctcaaacctcaaattgccacatctgtgtcctacttcactttgcctactactcctgcaacactgcaactagcactccactccactacactacactacactaggagtggtactgtagtacaacattccaagcaaatcgaaatgcagagattgtaggagaaaggattcttgccctgatcgatgcaagttcagaaaatgtagtgctccatgcagaattattttgtcagatcagtcaaaagatgtgcaaattcggctatgcatgagtagttcagaagaatgccaatctcacgagataagtaagcagcatactaatcactgatcagccaagataagtgaggagaatgactgaaacagctttcctttgcagtagcagcaatctgcatgaatattgcaaattcaagacttgatgccttcctttgctgatcagacaaggagaacggccaagaaacgttgtttggactacgcccatggcagattggcagatggaaaatttatgcatctgcaaatcctgcaatttctgcatacactgtaaatgtaattcacgagcttctgatgaattgatgcctgcattccatttcatccagcttggcatatgcaggactgcgtggttcagagatcttgcattgcacagaacccgggaaggctgcatcatcgcgtctatagctaatactagaaatcaaggaacggagtgcagatagaagcaagcagaaacggacagagaaaacgcatgcacagccaaagcgtattcctcttggtctgctgctacgaccactgcttggtctgctgctagtgcaaagctcttctgcaccgtctcccacgcgaattccttcctctctcaccctccctttggtcctctccatgcatctccatgccctgcaaccatttgtctctacctcgtcgaatctctcggacccagcagccactcaccactcactgcagtgaaacgcactgctatctgcttctcttcctctcctgcatgcgtgcttgcagctacacttgagaaactggtgagtgagctcgaaattctgacaagtatatagtgagaagatagttggggagaatcttaaaaaataggtttgttcgttcctaacttctatttcattttatgtattctataactacatgttctcaagatctggggaagaatttactccctctgttccaaaataactcctagtatatataatgaatctgagtggagagttatctagattcattgtattaggataatcacacctaggttgaactttttttggacggagggagtatatcatttagggtctgtttagttcccaaacaaaatttttcacgttctcacatcgaatgtttggacacatacatggagtattagatgtagacaaaaaaaatcaaatgcacagttcgccaggaaattgcgagacgaatcttttaaacctaatcgcgccatgatttgaccatgtggtgctacagtaaacatttgctaatgatagattaattaggcttaataaatttgtctcgcagtttcttgacggaatatgtaatttgttttattattagactatgtttaatactttaaatgcgtgtccgtatatccgatgtgatatacaggggcaaaaaattttaccaattaaataaacccttagttcagctaaagattttgagaagttgtagctatcataaacaccccgaaaccgggttttcattattgcatatgctgcttgtttgcttccattgggagaagagaaggcttcccatttcgcaagtgaagtggagcactcatgctagagtacaatgtgctacagtgccagtcagcttcctcctttcttgggcttcgccatcgccatgcttgagatagcgaggctgatgcttcaagaaaaatttgcatcctgggagtttgcgtcgcaatctttcatgcgtgccggcaaatcgcgaggccaaatcatgcccctttttaccgcacaaatgtagagttgcttgtgatcttgtctttaccaagggatagatatgacttgtactaaggtaggttttggcccatgataatgccagttttgtgtgtgcaaaccacagtgtcaaaactcaaaaaggttgctacctgcttgatgtgatgagtgcttgggatcaagttacagtatagtgtgatcagctacaggatcgatctagaaagatgagatgtgggaatagtaatttatactgtttctttcactgtcatttcatatgtttaaactgcatccaaattgttctctccttgtcagctgattcgattcctcatcagtgaaatgaccacaatatcctcccccgacatctcgtatgctgattaattcccagaattaacaccactaattgatccaggaactgcatggcatgccaaggtaattattaaattaaacaagctgatcagctattcagcatctgcatgaaaaagtgtttcttgcaaagatatatgcagtacaaaagagagggcatagatacttttaaggatggaataagctaaagcaaacgacccaagtaagattattcgatcgatcaactagctaacgctcttacagtttctttcaactgatgtgtcactcttgctgcacatggtaaagtagctgatcagttgcacactctgtctcactaactttagggattcttccagatcacctctcttcattctactgatcatcagttcatcacctctgcatgcaaggaaggaccagcagaagcatatgtacacttttgatcttgctagcttaattgctacttaccttattaattactagttccttaatcatcatctcttttcctaccaaacctgtactgctccatccagctagttcaagtgcagcttcatccattattactactgttacttacctgatgatcccctgttgatgcatgtgctagctctgaagaactctgaaacacattaacaacacaataatatgacaagcatcatcttttcattgcccacacacatacacaatcacacatgcatgaatgcttgaatccatagaccatggggccccaaagaagaggtttgccttcttcttctaccagatcttgaggtcgaccattggcatcacaattattcaatggttcacgggggtgacaaccctggtgtcccggggacccatgtctggctgactgcaactacagtctttacactgtatttttcttggagacattctttggagtgcagaaatttcaaaaaggaaaaaaactttacagtaatttggcagctaaattctctatggtcataaatatgtgacgttttggacaagattcagtcacattaattaataagtttataaaatctaataaggttatgataatacttttcgaggcgaatctgcacacatcattttttaagctaagcatttgaaaatttactgataatcagaattttaaaagtttgattgatggagtatttcagagaacactaaaatctggtttttcaaaaggccgttagtagtaaaaagctaatagggtaattaagccaccatacaaaacatccctttgaaaagggtaacagtacgagatctattatattcagactgatattcagacatggtccaagcagccatttggtgccacctaggcgtcgcccacatgtgttctcttgggatggcacaataggacatccatccacacatcaaatccattatttggcctggccagcatcatcaactcagctatctaccaagtgtacgcactatagcctatacaaacatacatactccaacataatggtgaggctgagccatccatcaataaaatcgagatgcagatcgatctatctatgtgtatatggatcaacatttgcatggatttgtagtagcaatcacagtatcacactcattcagtctgtctgtcagtcacactcactcacatgcgttgtactggtggtttgtgatttgtgaatagtaatgtaacagtgctagctaactattggtggctatatgtaagcatgcagagcagtgcattgcagcagccatgcatgcagcaggcagggtgtctagatcagagatgaggccatttttctctctgaatttgttggatgattggtgagattgatagctgatgcctgatggggctctctctgcattgcatcctagctgcctgatgggagcttgctagctatgcatcgcgcgcatgcagatttaacaaaacgagcaattttacgattcttaacgaggtaccacttttttactgtaaattcggtaccttatagtatctaggtacctcatagtaattttacactaaattcttgatacctcatgctacctccttaaagataatagaatttctcttaacaaaatcaattggttttcgtgaaaatcattttcgataatcgttggtggtctgtttatgaaaatcagtcgatttcagctggttttcgtgattgaaagtcatcggtttctatcggtttttgatcgatttaggtaaaccggtgaggagcggtttttaatttcaaaaaagaaaaaaaaaagaaaaacagtgcgtgtgcttaccgctggatctgatttttgattgatcagacggttcagatttgttacgtggactcgctagcagtgacgcggtccatgctacattgactgtcggttggttatcggtcggtcgatcgatgtgtttgtggatagtgtttacatgcttgctgtcattactcgctatgtttctatgttatttagtttttatcctaagtcaaactcctttagcatccactgagtttataaaaaaatacactaacattaacaaataaatgaaatatttgaagaatttcatgtaattgttatttattttgctgtgactttatttattgtcgattaaatattcttttaagtacgacttctatattttatgttttaaaaaaattaataaaacgaatggtcaaatgtttataaaaattaatgacactacatattagaaaatagagataatattaaggaaattattgtattttttccactccatgatcctacgactaaatgctttgaaagaggtaaaacagttatctagttatactagcttattacatgaatatactacgtggcttgttttagtactccttgcacttgggagggcagatcgtatctcttatattaaagggagaaattaaatatactcatacgtaacaaagtacacaggttaatctgatacggttaatttgtacaggaatctaaatatacggggtacggtgtaatatcgatgtactgctagtgataaatacaacacataattaaccaaatcaccctgcatatatttatcgacattgttggacctagctaatatgatgtgcttatgatgctatcatggcatcattagagttagcacggaagcttccatagtatgtcacggttatcagttttgtcggctatctgatttctatatttaaattgtccatttgtccttgtatatcattagttcatcgtatcagtcataatcatacatacatacatatatatatacatatatatatatatacatatatatatatatacatatatatatatatatatataaatataaaaactattctatacccccctccctcccatggctcaaacccacctcccaccttagtcaaaggtaagtcaaagcaccctcacgtcagtcaaaactcggtcaaactgcctaccaactcccccaccacccacctcttctcagctctcgtcttgcggaacagtgcagtaacgcgacagccatcgtgcagtaacgctgtgtcttacgtgcagtaacaacattcaaatttagttgaaatatagtcatgacggatctacttttgataagcacttttttctaacatcatggtgcaaatggttttaaaaaatcatatatcacatgagagatattgtaatttgaagcttgggtttttttgaatcttaactctccacaagtagtaacactataacattactacttgttactattatctgttatgcgttactacaatcctatcgcgacgttactgtaagtgtgtagtaaagaccataagttttgtagtaacaatgcgtcttactgcaatttatgaatagtgttactgcataaacatatggtaacatttccactttgtgcggtaacaagtatatttagcaggtgagacttttaacccatatttttcttttaatttctggtttactacagtttcaccatgatgttactgccaaaggtgcagtaacgttctatatgttctacagtaacaaagtgttttactgcagttcttggatagtgttactgcataaacatgcggtgatgtgtaactgtcaggtggtaacgtgtaccttccgtacagtaatacttttacttttgtgcagtaacaagtatatggttagcatctgagacttttaacatatatatttttgtttcaattcctggtttattgtaattcaccacaatattactgtcaaaagtgcagtaacgtcatatacatgcaataacactatattggagggaggagaccgattttcttaagaagagggatgaataatggtttctttaggagaggagtacgtagatgcattttgaagtttaaaccttcacatgcagtaacactatagtatcattgtaaaaacagttttaaaaaataatacatatcttgtgatatattgcttttcaaaaattggcattttgaactttaatcctccacatgcagtaacagaatgtgtaccttgcagtaacaagggcatatacatgcagtaacatggttttaccaaatgtataaaattattcaaaatgctcctacatcaatcagacatcgctcaaagccacctacaaactttacctatagcctacgtattcgatcttcatctcgtcaaaatgacaaagtaaaactacaattgttgtgcagtaacatagctacttgaaagtggtaacatgcacctatcatgtagtaacacttctacttttgtgtagtaacaagtatatggttagcatgtgaggctttaacccagcaatactagtcacttgaatgtaataacaacctatatattttgtagtaaccggacgcgttactatatttcgtgatggcgttactatgaaaagggtagtggtaacgagcgagagtaaatactaaagtttaggaattgttagttcgatgaacgataattattaacgtggtggtgacccctactcatgaaaattaaatgatggcatctcatcttacaatagcaatatataattctgatgataatatttctgtagccagtcgtgtagtaaaagatttgtgatagtgcagtaagatggtttgaagtgtatactaacaaccatccgagtatcactactagatgttttgtgccaaatactataaggatttagcacgtatgagaagataaaagtttactaagaaaactttattataactaagaaatagcctactggttagtgccatgtggtaatttgagttgaaggtcttgagttctattcccattgaatgcaaaattttcttttatttttttctctctcaaaaaagggagaggtggagggggataaggagaaaaaatgggagaggaggagcgattaggggaggagggcggcgcgctcgggcgctcggggagaaaaaaagggagaggaggagtggggagcgatcaggaggagggcggcacgctgctcgagcgagaaggtggggtgggaggtggggaatcgggaggaagtggggaggtcaatgggtgtgtttggttgtaagccacactttgctatagtttgccacgcctaaggttaggcaaatttgacaggtgtttggttgtagccacagttgtggcaagattcccctccaacaaattgggtcccacgtgtcaatggctcaaaaaagtgtggcaagattcccttaggcttagtaagttgtggctaacaatttgatcacctcaccttaggcaaggtgtggcaacttttgttggcaagtaatggtaaagtgtggctgggaaccaaacagccccaatatcttcagatcgaggcaaaatgaacataggctgtgtctagttggatccaaagtttggattttggttgaaattgaagatgatgtgactgaaaagttatgtgtgtataacaggttgatgtgatggaaaaatattaaagtttggatccaaactttgatctaaacacagccataggagtactacagagtggaactgggagcatcctggccgtacacgtgggggccttgattggccattgattcgaagaaagaaagcacatagtccaatgcaaattgcaacaccatgcagcaagaagaagcagccaagcagcacactgcatctgcatggtctccttctcgtcctccgatgcgagttgttaggacagcgacttcgagagcgacgctgtctcttgttgagttgctgtctctctccctctctcttctcttcttgcagctgcagatagaagaagaagaagaagaagaagaaacagtggccattggtgaaacgaatgtagaatgcgagtgaaatttcgaatggttttcaagaacttaagtttggctaacatttattgaaatttggttggggatcgggatccggcacttttaataggaaaagtgaaccctgcatacaccttatcttgaggtcatggatgagagaggtgagattgagaagctaccaatgctcacctcccaattccatggcatgcaggcaaaggaattctgaaaactgaaagccatgccatgtcgtagtaaatgcatatttatgtttttttggagctgatcgatcttgtgatctttattagccacccacacatattgaataaactgaaacatcttcttgcagcaacaaatacagctctgtttatctttgggtccagtactgtactctctggatgccctgctagattcgattatggatctgactgaccttccaacagcgacagtaggagtagttattacatccggtatgctgacagtacattttactatctcacaacacatcagttaggatgtgtttagttcacgcgaaaattaaaaaatttgttaaaattgaaacgatgtgacggaaaagttgtaagtttgcgcgtgtaggaaagttttgatgtgatgaaaaagttaaaagtttgaagaaaaagtttggaactaaactcggccttagtttaactaccttaatttggtacctatggtttgctgtaatcgatacttcatgtactaatcaagtataattaaggcagtgtaccatgtgttcatgaagtggcaagctgtaaaaataagtatgctgactgagcagagctgctgctgctgctttgccttttgcctttctcttttttctctccctttgttttcccagattttgctttgccctttatctgtggagagtgatggctgacctgatgtgtgctcctttagctagctagggtccttcagtccttgcataaaattagttaggattttggaagagagaaaaaaagtatgattgattatcacttaatccctgggatttatcttttttctggttgaattgtttgtttccagcaggttgaggttcccctgtcttggctgttcagtgttgaaattctggttccactgtttttggcctgtcctgcttgtccattcttaccaaaattgttttcttttaacatgttaccaaaatgatcaattttagatgacattttggtttgagcaattttggcataacaaagtagtacaagtttggtatacgaaacatttcctttttctcagtaagcatttgctagtttattatctctctttcagttgtactactacataatcatcatcaaagctactatagcacattgggattcatcagaaagatatcatcagctggggagaatctccactagtcgtaattaataaacaagatattgccctacaaggattaccttgtggagctcatcataatcatcatgcatgagacagtactacgtggccctaattgagaaccccccatctgtttggcaatctcatcacacaatcaattgcataataataaacaaatcaacgaacaaacagtaatccccagaaaaagaagtcgcacatgagaatcatcatgcctccaaaatttcttctcctccatacatccagatacttcttctcttcccaactattagcatgtttatttgcagcatcaattcaaacatttctagctttgacagttaatagcaacaaaaccgtaaatattaatgacttgataacaattttaatagatttaccatgaaacaaactatcataatatgcaactctttctacttagaataatttatcgttataaatattattgaccaaaataacatatcaaagacaacttctaaggtaagcgaatattagggaatgacctaatatcaaatgattagaaggggtgatgcttcgaacccaggtcgtctagcccaccaccttgtgaagctagcgggaagaccctgtacgtttttcacaacttctaaggtctaaaatactttatacttgtattggtggactgagagatagtatctctcatggtaaggatatagctgagcatcaatgttcagaaaagtgcaagaggacaagccattcattgtgcaatcacgctcgtcgtcttgcccaactgctctatgctctctatccccaggtcccctgtcaaattctaaaacagtcatccgatctcgccaaaacgccatcattatacctacctaatgctaattctagcttgcatcacgtaagagctttgccaattatataagataaactagtagaagaaagtttgtcaaatgctagctaggatcatgtgcatgggcctcctctgatctgcatggtcggtctcctttagcaattagcactagcttggctaaggttttagcaggttgatgttgtggagaggagaataataagtggtgcccttgtgatcttatctggtttttcagcatattccaaatcctggccggcaagcttgctggttctgataaatgtccgagaaactactttatttgcccccttagggtgtgtttaatataggccgagcttagatctaaacttttttttctaacttacaacttttcaatcacatcaaaacttttctacacacaaactttcaacttttccgttacatcgttccaattttaatcaaatttttaattttagcgtgaactaaacacacccataatgatggataaatctgcactttctgatcttctaaacagtatgattttcattaaaaaaaacttttatgtaaattacctagaaaatggagttttctaggtaattatttatgataaaatggagtaaatgaaattaaactcgaaaaaatatatatatattcccaaatttattagtaaatgatttttttatgatgaccaaaatggggttaaggaaatattgtgaagtaaatattgcatctgtaaccaaaacattccttgtggtacaagatgcatttttttgggttgagtagcccagttttccaggtaagtactacagtactagtagaatataaaaagaagaacagagccaatactttttctgtcatcttcttcagtttcttcagacagctgttgagattgctggagtcaccactcaccagtcaccacaatttgggtgtgaacagatttgaaaagccaaactgtttcttcatgagcttggaactgaaggacaaaaaaaaactaataaagcaaactgttccaggagtgcttaaaactgaagaaaattttttttcacccaattcttttgtcggtcggtggtggtggctactggttatagcacattaagcaccgtcgcctcagatttttcgacgaactttaaactggatttgacgcgacaaaaagcagccttggattggttccatgcaagtgctcttgcagcacctagcaatagcaagccaaagcaagccatcagagatgagcccatgaccatgaccctggtcaatccaaaaggaaagacactgagcattgcagtagtaccaattgtacacacctcatgtccatctccatccatggccatggccccctccacaagccaagccttcaccttttaccccccccccccccctcccttcacaaactacacggccacgcctctctttctcatggcaacaacggcgtccaagacggactccgagtctccgatccctcaccgtaacgacaggtgccgttgaggcgcactgatatgcgagaccattggtaccattgaggcacatatgtggactacttctttatttaccacgaacacgtttcccacgttgttaaatactacctcggttttaggttacaagactttttaacattgtccatattcatatagatattaataaatctagtcatatatgtgtatatatttattaacatttatatgaatgtgggtaatgctataaagtcttataatacgaaacggagggagtagtatgtttcgtgtaaaaactttttattaaaaagtttctttcataaaaataaaataactctaacttttaagtttatatatgtcagtgacatttctttccatgaagtttgaaaatctcagccttacctcacaaacaaacgtagcacaaagaccgacacaaaacctctgtcataacaatcagtgccgttgatacatgtttacctcgcttcacaagccacacctctatctcactgtaacaactaagcaatttacagcgacgtccagaacggactcggaacctccgttgtaacggcaggcaccattgagacactgacatgtgagatcatattattgtgatattttattttagtagaatatattattgacagaaataggagatttgtcccatcttatttttttaagcttttttctgttcacttttggatattttggttgtgtgcctacggataaaggacggagatgtaatccatttcctttatatgaaaaaaaaccgtgtcatcgaatcgattcaccgacatgtgggcccatttgggcaattgggcacctaccgttacggcagaggatactcgtccgacccacagagtgagggattaaggaagaagaagaggttgattgagatgttggtaaagaaaaacagtaaacaattgggtatgtgtgtccccatttggggagatgaaggtgaatgagctttggatgagatacatggacacatatatatagatatgtatatatatacagatttccctccaaagtagggtgaagcaaagcatctcattccctcaccccccctaccccagttcttctccttcttcttcttcttgttacctttaatcctctccccttctcttctctgttgcgtgcaagcatctctcctcgtcttcctcctcagattgcttgcttgcttgcttgcatcctcctcacattcaccacgaggtttctgctgctggtttgtctgatgtgtgagatagaaagagagtgtgagattgaggacgaattgaagcctagcttgtgacgcaaagttggcatcttttggtttggagaggcccactgtttcttccacttctcgccttgctcgcattccttccttgcctccatccccatctccatgccatccgtgtgaagcctcgcgccgtttggttggttgcaagaacgccacccgcgttggttgttgccttcgcttctttggttgctgccgtctacaagaagcctctctctggcctgtgctgcattggcctcgatcggtggtcgaacacatgttccacggctcgccggcggcggtggcggcgtcggcggcggtggcggagatgaggttcacgacgggggggtcgtcgacgcggtcgtgggagccgacggtgacggcggacacgtcggacctgcactactggatgcagtggcgcgccgcggtgtgcgcgctgtccgtgctcgcgtgcatggccgtcgcggcgtgcctcgtgtggcgccacgagggccccggcgccgaacgccgccccggcggcgcgtccggcggcggcggcgggagcaaggagcggcggcggccgggggtgctgtacgacgacgaggcgtggcggccatgcctccgggacatccacccggcgtggctgctcggctacaggctcatctccttcttcgtcctcctcagcttgctcatcgtcattgtcatctccgatggtggcaccatcttctactactacactcagtaagccactccatttcattttctcagctactactttttttttacctcttcattaattatctgttcctttcccccaaaaaaaacatgtcattttaacttggaactttggaagatggtgttcttgatgcaaagtttaacttcctccttatctgttttcccccatataacttggatggtgttcaggatgcaaagtttggtgataagattttttttaaaagaaaaaaaaaagcaaggaaatgagattgattaaaattttcattgtgtgctcaagtgcttcaactaggaggaatgtactgtggtcaagaagtttggcatttgttcccctttggtgtaatttagatttttcagggaataaagggtgcttttccatgaagcaattggttttctgaacatgcatataaagaattaatgaaaactgtcaggcagaattcctggcattttctgttaaaaatactatgcacaattgatggctaaaaacggtttgcctgttagcttagacagcaagcgacgcgcctcaccattttggttctattgttcatggtcatgggtagtaccaagatttgtactagcacatctctgaaactgtttttatatgtgacacattacctcaatttaataattacaaaggacctcacatgttatttggagcgcatttaaaaatgcagtcttttgtgcagtatggaatacagtgtcataactgttcatactcagtttattaactaccagtctaccagctagaagtactgaaattcggcattactacctgtatggtcagtagtttttattaatgtttttgattaatggaatggacaacactaggaatacccactccaacttagctacctggtcttacatgacttcctgttccattaaacatttctcacatcaagttaatcaaatactgccttttgataatatattataatatatgacctttttgttgcaaaattctggtgtttatcatatttctcaataaacaaactagtgtatctggttgcaagaatcaaattatcgttacatggatccgctagttgttggtgtttgtcaccctgctcccagaagtagcatttgtcaccagccttcctcctctaataagtggttgttgaactgtcgataatgcaggtggaccttcattctggtgacgatttacttcggggtaggtcccttaatccctcctttttcacaacaaaatagtttgtctctgcactgaattcatgaatctaatgattcatgtcgatttatctttacatcgaacacatctgaagaaaagtttgttttgtggaattgttcagctcggcacggcgttgtccatctatggatgcagcaagcttgctgatgagaatgttgtcactgaaagaacagacatggagctcggctcgtacgtcgcccatggagctggtactaaacccaatttgaatggggaagatgacacaggagagattgctggattctggggttacctgctccagatcatctaccaggtaaagagggattccatgcagccaaagaacttagaataaccatccacttgagcgcctttttttttcttatttgttattgaagagagttatcttatctgcactgacatttgcgtccatggagagggggtctgatctcattaggcttttcatacgcaattattgcactaacaactaaagtacgtttgtggtgtgctctgatgaattggattccgtttctaaagatcagatgtgcccacatactagcatctttgtccggtcacatttcaagggctctcacgtagccgccctacatgagccatcttgacatcttgttggtcctatctaaatattcagataatctctgcaaatctcacatttccttgtacctcaagggctgaatcagctttaaaccgctttgcgaaatgtagggctgactctttttagtagtggcatcaagaataaagacaacatgtttcctttgtgttgatttgcaaggcctaactgtacccaaacggtgactgaataccttcctaggctgaaataggacagaatggaactattgttctgctttgtgataagaattactagatagttctatggatggtagtttactagcgccatgtttagttccaaagttattcttcaaactttcaactttttcatcgcatcaaaactttcctacacacacaaacttccaacttttccgtcacatcatttcaatttcaaccaaacttccaattttggtgtgaactaaacacaacctagatctgtgttgggttactgtgtacactttgccaacaaaattttgtaatatatctcaccttttttagagaaaagaatgggtatattcattaattcataatcgttgtgaatatccttttaaggatttatgctcttattatcaaactttacagaaaactgagtaatttatgtaagttttacagtttactagcaatttttactgaaccagtatctgaccttttatctgccatgacagacaaatgcaggcgcagtgatgcttacagattgtgtgttttggttcatcatcttcccattccttacagtcaaagattacaatctaaattttgtaagtattacatgcttcaggccttccctacctgccatctcatactttgaccaatacagtgctaaaaattcagttactatgtttcgacagttgttgataggaatgcactcggtaaatgccgttttcttgcttggtgaagctgccctgaatagcttggtaagttgataactacttatctcgatcagtcaagtaattttatgaatgaatgaatggttaatttgacaattacccactgaattcaacatatctgcagagcttcccttggttccgggtcgcatatttctttctctggactgctctctatgtcatttttcaatggattctccatgcatcaactccactttggtaactttttttttctaactcccattctctcctaactactaaaaccatgactaagagtagtacttgcatctttctgttactgatcactacatttcatatctatttgtcaggtggccatacccatttctcgatgtttcagctaatttatctcctttgtggtaattccattacctccctacaatgatacttcctcccatatgtcttctcttgcaaagattacaaactgaaatcatcatgaatatcacaactcaaatcatcagattttcaatgaatcttttcatctacacaggtacttcgccgtcgcgatcatgcaattaccatgctacgcggtattcagactggtgatcaaactgaaacaccacctgctcacaaggtggtttccgggttcagtcgtaagaggctcatctacaccataagccaggccgtcatgcatcatcttcctccgccattgccaacagtttatacagaaagggcaatggtgaagatcacaagaaaagaataatggcagcctggtggtgatggactgatggtggcatcgatcaccgactccatttccattcctcctttgcgagattctcttattgcagcaggtgcaactctccgagcgaaaaaagaaaacaggagaggcacatgcgttttacaccaccgtatagtagttctgatagatgtaaattgaagcttacaggttcagatatgagattcagagagtttttctttttctttttggatgtaatggaaactgaaatgaacagagagaaaaaaaagagtgtggtggggttatgtatagcttgactcattgactgattggtcaaatggaggagatatttgttaacattttttttattttgtagagctgattaattaatggtcatttgtatatgtgattaatgctaatgagtaatgaatggatgcaagtgtgtgaatgaggttgttaaaatcgagcaaaatggtacacttatgcaggaagaaatatgcatgaggtgaagggaggaagttgagtacctgacagtgagaaaaaagttggtttgaatttgccatctctattgattacaccacaagatcgttaggtgttgttcgtgaaaaagcatcaacacaaagcatggatggcactagtgttttaaatagcggactaaaaacatttagctgttagtcttctcaaactactataacgggctaaataaagttatagcggctaaattatacatgagagtaattagctagacttttttaaaatagctatagccaaagatttaaaaccttagatggcacctcgactagataggtaaggtcgccggagagaggagctccggccgccgtcggcaataattctgatcgaagcaaacttgaaagaaatcttgtgtaatttcagagagagttcggcccgttccgatacctcaccttcccaaaccgatttatgggccgcaattctttactgggccgaggctggtgaggcccacgccaagggtatttcacgataatctaattctaaaattaagttttaaaattctagctttgattatggctgataagccaaaatccaaacgtctgatgctcaatattatcgatgctgtagctcgataatccgtggcaataatccactcggtaatataaatcaaacggggataaactttatcggattggcatgcatattgacatttttcagtgcgaagattccttgaacagagcttaaatatgtatataacccatgcgaagattcctcgaagcagttcagacttcagatatatctgaacttgcgtagtgtttactcctccagatatgtcaatctaggtagaaatagatcaatggaatggaattttgggaaatttgtggcatcgaagcaatgcttcatatggaactgaacaaatcagtagctcagtgtttccaggctaatatctgggggaaaacttatccaataattcatgcttccaacggcacatcaattccaagcattcaagtctccaactctttatatatatctcaggtttccatcacattcaagaattacaactacaaagagttcacatcagttagttagtttgttcttgtttctgacgaagaaaaaggccatcagttgtaagttgattccaaatgtttctgcagaagattcaatccatcattaaactaacaaatgtttctgttctttgcaggaagaagacgacgaagaagaatcgcatcaatggaggtgaagaaggtggccatggttgctgtctgctgcatgttcatactgctgtttccaggccagcagcagcaggtggctgccatgtccaggatctgcagatgctaccacgaatgcttgcccaactgcggcctgcgcaattctcgctccttctgcaaggtgttctgcggcagctgctgcgtcttcaatccagttcacaattgcactagcaccgatgcggcggccgcggcgccagcgatcgccggagacgactgcagaatgatctgcctgaactccttctgcggcgaggcagctacaggctactgtaagatgcccattttctgcaattaattttgcatgtcatcttttctttcttcattttggacttccctttgctacgcttcccaagtttctaaacggtgcgtctcgtgaaaaaaggatctatataaaattattttagactttagagtagttctcgaaagcaatatttttaacattggagtagttaattcattcgtttgcccttggatttcagctatcgcatctttagcttcctgaatccattacaagcctgcatatttgattgattagttaggagtatttgaaacaatacgctgaattttccatctgtttgattgtttgtcctttgtgtttgcattgcagtactaatgttggtttgtttcgcagcggggcgaaacgatgctgatgctgcagcttgtctcgatggctgcagcaaaggatgaactggttcggaggaagtttgacatgttgtgacgatgatcagtatctgctgcgattcttgaattgactgttagagaatggtcgacaacaactaaatataattaactatgataataagaacaataataatgtatgatggaatctcgatcgtgtgccaccttctctggattcgatacggaattacgtttgctgtaacctgcttgctactgatcattatataacgttagttgtttggttacagtgttcaaatattctcgtattctctgcgagcaatgcaatcttgtttacgaactgaaggatggtgtttagatcatactggatttatgaattttatggtttttgagagttaccgaaacgtaccaatggtttagtgcaaaattttacatgaaaaaattctcaagataagttgaagatatactagattatgtactatttcgcaattttgaatacctaaactctgagcgtactaatttgctaatccgtgccttaacgattaaagataatccaagaaataccattaacaagtgtccaaatcccataaataccatcgataagtgtgagttccaagaaatgttatcgtacaaatgactttatcccaaaaataccattgttgttagggtttcatccattttgcgccgttaagttctataggataaacagtgtatttaacggcgtaaaatggatggaaccctaacggtgatggtatttttgggacaaagtcgttaataataatagagttagctctggcagataaaaccgttgatacgatgagagcaactcaccagtcaccatcctcttgcctttggtgtcgtacaggaagctcgggcagccgttcatggcgacgagcagcacaccggcgtcgtccaggacggccttaccatagccgtggggcttcacctcgccggagtagtaatgtcccggcggcagctccacccggaggaggcgcacccagttctcacctccggcggcggcggcgatccagacgtccatgtacggctcggtcgacttcatcgccgtcaccgcgagcgcgccgtgcatgtcgaacatggggccctcgtcggcgtggctcaccggcggcggcggcgccacccgccggaacgtctccgacaccgtgtcgaacgccgacatctggccgcggtcgtcggtctggcggcgaccccagtacacggtgtcgccgaccgtcacgccgaccttgacgcagaagtgggagcacacccggcgttggtggtccgggacggggccgagccgccgtggctcgctggcgccggagccggtggagaggatgtagttgtcgccgttgcggtagcacaggacgcggtgctcgccggaggggcggtggaagtagaaggcggacgggcggaggcgtttccaccggcggcagatcgaccagctgccgcgtcgccgggttgcagatgagcacgccgccgtcgccgccgccgcccgtgttccgctcgaacagcaagaggccgtcgcaggagccgcggaggctgacgcgcatgtcgcgccgcagcaatatccggcgacccgcgtcgtcgccgtcgcagaaggctgggatcacggaggtgatcaccgtgaacacgtagctgtagggcgacgacgacgagtcaacggcgagccccgtgtaaccgagcagctgcagcggccggcggcgggagtgggcggcgacgaagtaggcggtggtggtgatgcggcgccaactccggcagacggcgcggcaccggagcacggccttcgccggcagccgcaggaggatctccgcccccacgtcgtcgcccatcgcggcgcactaatcttgacgctggtcaggtcaggtctctaccacgtctctagttaataagaactagtgggctgggcttcttttattacgtggactggccttcttttgttcactgggctggacttgttgcatcttgtggtatgggcttcttttgttatgtgtcctgggcttcttttattatgtggattgggcttcttttgttttatgggctggacttgtttcatcttgtggtatgggcttcttttattatgtgggctgggcttcttttgttaaagcgcggccttcgcgacaaacgggggaatcgcctcgcgaccgaaatggccgccaccgccgccgccgccgccggagttgccgttgccggcgaccgcgcgcgccggcggcagtggaggtacacgtgggagagcctagcgcacctcccgctcctacgcctctacctcttccgcccggagctctccgccgccgcggccgccgaccacctccgcgccgacctccgcctcgacgactcgctcctcctcctctccttctcgctcgccggggaaccagtcgccctcagggtccccgtcccgagggtgctcgtcgacccctccgcccctcccgagtgccgcgacgcgggggaccatgtcgaggtccgcctcgcgctcgtcctccccgtcgaccaccccgtcgtcgccgccgccttcctaccgccccccggcgaggagccgcccgcgcctctctccctccgcgatggtgagctactcgtgtgttttactgtcctgtgaagttattaggtagtagggtttatgagctttctcgttgattcctggccaataattcgatccccgctagtcactccaaatcgtcgtatgcctctgggattttagtactaatgaaaacctaagtcgatttgcaatttaaaatgctagtaaaatgttactgtattatcttaatgtaatctcccctgtttatattataattatgaatttgtgattcattttcttggatgaacagatataaagaatctgtcttctggagatgttcacttgtactgcaaagcatgctcagcaagattgacaaaacagccactaaggtagagcataacagactttgagttgtgacttatagttgttttgcactttaccatgtctaatggtctgtttatgcaccgcgcatatatttctttaccaatgaaaagatacatgcaaatttcaacttgcttacttcttaaatcatatgtttgatgctctggggttcacatttagtagcaatgaaaccaccgcatgacatcttctttatcaagttaaacaatttgtcattgttcatgtcctcctatgcaacctattctgttcacatgttttgtgcaaataacttcaaacatgtcttggactttcatatcatcgcccttggttttaagttgggggaatcttccttggggggatggcctgtctgcttgatcatagaggtttacgaaagtatgataaaatgttctgacctctacagaagcagtaattttagggtattcaacttgtgtcctgactgagggatagtattgaaaagtgggaataggaaagaatttgtcccttggttgtttattggttctcttctggttctcagttcgaagagatataattcagtcgttagatgctggttttctgaattcctatagtggcatttattctataatcagtttgctgttatctgattatctccaagaaacccactaaagcagtatgtccctcagtggtatggaattcttattgcaagcaagcatgttatgctaaggttttggtcacttgcaagctagagtttaagcttttgatcgtgtttcgcaattagatcatagactatacttaaagaactagggaaaacctatgtgccaaagttcatatggtggagttctttttttatattatctttggtgattagtaaaatatacatgcatatgttcaggaacatcgaggaaatgccatcgttaaactgggaagatgtggctgacaattggtttggtggatgttgcacctcatttggaggtgcaagcgaaaagctagtatcacagtatatcaatgcatatgggcgtctagagggaacaagtctactaaatgctacctccattagcatagaaaaggattatcttgagaaggatttagcatctgggttagttagttcagtgcccagtaacgattgtgatgctctgcaggaagatatatgtgatgttcacataggagaagatcataccacggggaacatggaatttaatagttcagaagagaaagcatatcatgaaaagcagattggttgtaatcatgtgcaatgttctgttgttcctgaagagggtccttgtgtcagtaatagtgaaaaagatggagacactctttggactgatcaatctggcatcattaaagtgaaccccgaggagtctaaaaatgactcttgtgttgatgacatagagaaacctaccaaagagaccgatttgttgtctgtagatccatgcaattgctgttgtgacggtggaaacagcagaaaatctgaagacaatccttcgaacgtgccctctgggaacctggaaatgcaggctaaattggacacccaaagagattacaaattaacaaaaagtatatctcttggttgtagcttcattgtgaaagcatctaaccttgtaaatgatgttgaatggcttgaacttctatgtgctcattgctcatcacctattgggtcatacccttcacaacattcacatgctccagcagatggccgtgtacgactatttaaatgctatgcatcgtcagaccttcatgttgggggacctcatgatgtgttcaggtcagtatcttcacttctcattgaatattttgtacgcctctcaaaggtaaaaagggaagggaaaccagttcagtatagctaggcagctaaagtctatggtccttgctagtaaactgatttcatcactgatcataaacatccattatctttatgcagggggcatacattagaaagactttttgttaatttgttgcttgaagttgcagaagatgaaatatcttttcgtacattagtcagagatctgaaaaccaaaaggcccatccttcaaatagtcctccttagttcaaaagcgtggctgttttctggctactgctatgaaaatgatatggatggttcacatggggcagcacatctgcagccctctgttaagatcttgtattctaattgcagtaatgctttggaagaagacttaaggtacgtgatctgcttacacagctaatctagacttgttatgcttttcttctgccttttatccatattaaaagtgttttgggtgtttgtctttcttgtgctaaatttgtaaagatatattgaagtttgcattcttacatacaaagtggaacaaaaaaaactctgaaaaataattgaagggatacacaacccctggccatattttctgaggtaatgcttttgttgatgggaactatgctgatggcacactgtcatactttgtctaaaacaaatttcaatatcaattttagtcagcttcattggcaacttgtacttgggtaagtctgtctgatgtgtgcaaaagagtatgcattgtttatttgctgccaccattttgattttctgcgttttccattatgcaggacagtagaggagtggtcatccaaatatagggctgaagagttgtacatgatgaggcgtcaaatagatgagcttattctaagcctcaactcagctagggataattttccactttcttgctcttccctccagggaatgtacctctcatccctagagcgttgacttgaaaatgagataagctcggatcatgtcctcatgccctaatacctgtgcatacacagttttaatattctttcagtgaactcattgaccatctcataagtaaactgcaatacattgggcttgtcttttgccgtcaaaagacagagtggcatcgaaatggagtaatggaacagagcaatggtggatccagctaccagtgaattctggctcattatgctttcggtagtaggttgttttattcaaccatctggttatctacttcatacagtatttgacatctcgctgtatctctgaagaattaggtgatcctgcttgcagtctgtatcctggtatacgtttagattttctcccttaatggagctaattttgattcttccaattgcatttatggagtgatctctaaatggtgcattatatttgttcagctctgatagtctggtgggaacaaagcattctgatagtcgttctccttatattaacttatggacaatactgcaatagtggtagagcctgaacacattcatctgataatactggaccaactaattggcacacactatgaatagcttggactatatactccaataatatagctacaggaaatagttgttgaatctttcattggtactccctctgtcccaaaaaaacctaacctaggacttagatgggacataatctaatacaacgaatctggacaagctagtacaacgaatctggacagacagcttgtccagatccgttgtactagattatgtcccatctaagtcctaggttgggttcttttgggacggagggagtacaagtgtacaacccatggttccctatgaacttcggtaggagtactaatgtactatcctagcctgctgtagcacaccaaacatcaacagccttagattcatttacccatgatgatccacgtaatacatgtcaggttctttagttgaaagaaccattccttagtctacatttggctctaagatccacataaaaacaatactttcgtttaattatacttaccaactattctgcacaaatagtgcagcttttgttatcatacatcaatcagatatctttctgtaattctgctacacttcaaacaccttttcttgatgcatttcatcatagtattcatcaatgaggtgactgtgcgtgtgaacctgcatttttgtaccacatgtgttctgcaattcactctcatggatctgaacatgtgtactagagatacggccatgttgtgtccacgtcactgtgcacatgtttacatagtagacctctttccaaaaccatgaaagtgccatggaaaaggctcatgattttatcaagtgttgttacacaaatggtgaagcacaacagccaacagggccatgcatggaatggtgaacattggccctagtctactggttgaaagacttgtcatgttctcactcttgcattacatagctttgaattgctttgttgatgaagcatgtcctctaaacaatgtaggatgcaaaggtatatgactacccatcagcacatggacttaatagtcttaattagacctgataggtgcatgccaaattattacatggaatgcagtgatcaaagttagcttgtgcataaatgcaaaaggaagagacaacaacttgtagtactatctggtgatagagcaaagctatacatattaatggggattgagcctgatatgatttttctaatgcccatcaaaactgtccaggtcatgcatatatttcaacaaagatttttcttccttccatatgcacttgtctttttcattcatcatcttatggctaagttgcaatgatcgagataaaatgcattttaatttggtcctctaggaaatcaagcacaacactcacctctccctgtctctctcatttatcccatatccaatccaataattgaatcaccattttattagatcaatcaggacaaacattggagtcttgttacatcaattaatttacatatacactaacagtaactcttcttgtttgtctagctgaagacttcaagggaagacaccatgggccaatagattaaatacatctatgcctataatggcagacataataaagtggagctagtctctctaatcatctccagtactcttaactggagctttcatcatgtggacacatacccaaccccagggctataattcagatggatcaaccaatgcaagccttatctttctctggcaaagaggatctgtacctgagatcctagcattaaaacccacagtttgtttttaccttaaaaagctgtttgagtactactttccttaggactttattcggccttttactcttttctatgtgcattacaattcttggaaataaaacaaaacctcttgaatcttgatcctataagacagtaacagttcaacaataattgacagcagcaattagtgatcatgcttgtagatgatttccacaagatgaatcaatttctttatccatcatcacacatcttaaactgattaagaatcatatgaaacaaaagggcacatctagtctagtaatgtatctttagtaaaaagacatagttaacagcagtgatgtatattttttttactttctttttagggttgtaataacaaacaccttttcactgtgcagggtcaaaccagtagaagcgggaagacagacattgcaaggccggtgcctttgagcaatgtaggggcccatgcatagagggatccaagggagaaaaggtatagtagatagcactgaggcctagtgggagccgttacactagtatccaaatgtttatacagtaatagtatattgccaagttaacagttcagtccagtccaactgggttggatgatcatatatactacatactgtgtgtgtgcctcctgcatccatctagcagcagttgtatctgaatttttaatgtttaaaggattagaacattccatggaacattgggatacctacactgaccagaagctactagcacttcaaaggtagtagtagttgtaaaaaaaagaaaaatcagtgagaagttgatagtgtgcatgcatgtattgttaaccactgcactttgactcttttttctttcagtgttttggagtgtctgatttgtgtttgcatgtaggatttgatttatacaacttggatggattaatcctgtaatatgatggacttacaaattttgtttgagatagccaacactaagcattattgtcctctaaaaaaagcactactgtcctcttttattaggtttttcaagtacaagaattggatgacatttttgtgtatcatgtacgggaattggcaactttgctaaagttcttgtgtaaaatataaatagtacctccaattgggatcatacttagtatatttttcttctcgaagctcgagaaagtaaatcactttaggaacaaccgattatatcaaatgtacaagtgacttgcatgttttcggggatttaattaattagatttgtgctaagaagtcagattttcaaattttggcgggttagagctttgctatattgaatcatgggctgtcctgagtacatatgttagcattttgcagcaattttatttatttaaaacacaacaagatatgtgaatccccccatgatttccattgagaattgctacataatcaaataatcccgaaaacattttgcgaagttttgtttatttagatcccaggttgagggttagcgtgtgtgtttaagacatcttcatcgtcaccagcaatagttaaaaaaagcatgaaggaaatctgatgccaatactctggaatctcatcaatacttatggcttaattacacattgtagttggaaaaatatcttgtgtaaatattgaaaaagaaatctacaaaatccaaaaattaaaaaatgattggtggatgatgtatgcatggccatgcaaacattcacaatcaccaagctcaagtgcacttgaaaattttgccatttgctaaagaacttggaaatatccaaactctatccaaatgccatacagaaagagagatgaaagaaaaaaaaacgcgggaaatcactgagcacacacaatttaagagatcgagagagcaaattacaaatgcctcttgattaattcttgaagaaatgatcaatcaaaagggatggaatcatatggaaatcactcacactatcatgtgctacaaagagaaacttttttttacagctgcactgatctctcactcactcacccatgcatgcacacaccattaattgcactgatcttcagagctagacttggatcaaattacacttaaaattcaagacgaatttatctctctatgaaattaattactactaatttgcctttgcaactcggttggcaaagacggcctccaaatccgccggcacgcggaagaactccagcgagtcgccgccgtcgtcgtcgcagcagttgcaccgccggccgccgccggcgacgatcgccaccgccgccgtcctcggcttcttgggcgccggcgggcacgtcgccgcctccgccggtaatctgcactcctcccctctcggcgtcgtcacctcctcctcctcctcctcctcgtcgccgagctgtggccggctgaccttgaccggcttcagcgacaccgtgatctcgccgccgccgccgccgccgccgccgccgccggcgagcacccacacggcggcctgctccttcttcttgcagctctccggttgggcttcgacatggagatgcagcctcttcttcacttcttggatccccatggatgcgatgaattacagcagctaagctgctacttcttctgctgcttaattaacagcagctagtgtagctgatgaattactgaattaagctttggtgttaagcaaagcaggtgaagaaactggcaatggaggctttcagtcaggtgagagatgaacagctaagctaggaagtgcagtgagagtgacagtgtagagagcaacagaagaaagggagctaattaaataggtgagcctttacaacttttttttttgagttgtcctcttttgtcaaaggcaaggggtggctaactgtgcagtactgggtttgagatggaaagctggtagtattaagataggctttgtacttgtgtattaggctcctaattattgaagctgcatgcatactgatacttgtcagagatttcagtagttgttgaggcccatgtcttcatgggcttcaaggcccagtagcaaataagcttgtagtagttattggtgatatatatcactaattgcactttgggcaggcccaaagtaatacatctcaattgctaactccactgtttttggcaatttggcagaaacactgataccctttttgaaaaaaaggataggaattcctatatgagtcatttagattgtaggattgcttcaaaggaaaatcaaaagataggaaaaattcctcccctttttgtaggttaaacctcattgtttcaaaaacctttgagatttccaaggcttcttctctcaaaattcctatggttttcctgtgatatatccaaacatatgtattaaataattctttctgttttctttcctatgggattttacatgtgatggtattcaaatcctacgtttttcctattcctattctaaaaatcctaagttccaaagagtccttgatgtgcaacactctgtttgtgaccatcctgaaaccgcatgaattctgaagagcctgaacctgccttgatgtctttctccctagccctagcctcttctgcagctttctgttgttaacagacaggcaattgccaactgcagaatcttaattctgtctactaattagctgcaaagacaatagtgctcatttgatttctttagtcctgaactcctgattctttgctgatgattcaagccaaagcaagccaaaccaaaccatcatgcaagtgtagtacttcttgttcttgctcctcttgtgttcgattggactaattggatggacaccttgatgatccagctgcatgagagtgagtgatgacatgggctcccagctggatagctgcacattctggtgagtgtgtctgtctgtgtacctaccgtttaatttgggcttttggcaaattggcaaatataatacagataatcccagatcataatccatctcttaatctagaaccccaatgatgattattattttgcttagaagggatagagagagagagaaaaaaaattaggcacctaattgtagtaggggcggttggtggggcccacatgacgtcagcgccatatgcgtagggacagctcaaccacgaggagacgatgagaagactgacaggcaggcagacacgaccgcgagcctcactttcagagttttcagaagtttcagagttttcagtacaaggtttgatcgatactgcctgcctgccttcctgcatgcaatgtatgtatggctaccaaactgcttagtgctaatcttgtcaacttgaaacagaattatgatgagattgaagtcatacagagatgatgagtactcaactaatcttgtctgtttatctgcatatctggtgagaaaaattctttctttagatgtatctggtcagctatttgttgtctactgttactctgttagtctgattgcaagtgactagtgtggtctggaatggatagaggagtgcagatactgggggcccacatgtcagtgacacagcacaagagtggggcccaggaaaatgtcctcacttcgctggattcacctgcctcttgaagcaacctttcttctttcttttgctctgtgatcatggtaaaaaaaaagaaaagaaaaaaaaagaggggaaaaaaagctgtctttgatgtgcccacatgagcactagccagcctgcaatgcagaagcttttgcttccaaaaagccttcttttctcccctttctccatcctacctagatgccgtgtttggtagcaagttcttcgtagtagcttgtctgatctgtaaaatgtagtaagcagctaatcttcagtatctgtctgagattggtaggagcagtatattcagttcagtacacctgtgttgcaggtgaaaggtcttggttggtttgaagccaattttttctctttcaatgtttggtagtgctaaaacattggcaagtattgatagtactaacttttgtagtctagaatttcaacaagtatggctaaaaatttgtggcaatccaaacattcatttgaaacatgcagtgatgatgaaagctaagacaattcctttttttagggaggtgtttgaaacagattattcacgagatttgttacagtggatttgtctacttgattacaacgataaattaaatattttaagaaataaactcaacaaatactacctccgttttttaatagattacaccgttgactttcgggtacatgttcgatcattcgtcttactaaaaaaattatgaaattatcattagttatgttagttgttttatcctaaaattattttaagcatgatttatatttcatgcatttgcataaataattttaataagacgaatagttaaacatgtgtttaaaagtaaacggtgtcatctattaaaaaacgaaacgaagggagtagtttacaacaagtcatctaagaaacatagtaaaacaaactattttaagaataacatgtttttaaaagcgtgtaacaaataatccacggcagagcatgttctattctgattcctgagtcaaacaaggctggaaagcacaacagtaagtggacctatattgcaatccaatcaaccaacctaccctacactctgaaaggccatagatccaactatccaatccggacacatgttgtggaattttgatctttgaattgctcacacatacttggaaatgcagaagtgaaacaaaaggcacagtgagagttatactatatttagataattcaagttttattaaaactcagtcaattacaccaagataatataatcgaactgaacccgcccaacctctgcacgagatacacacaaccaacgagttatactacatatatgaacaccaaccttcttgaccatataatcagtctccaatataaccgttaattttgactgaaagaaatatatttggagacccaataaaattatgatattatgaaagaaaaccgatagagtaacaaaatgcgaggaaaaatatctatcataagccaacaaagcaatagctatacgtacgtagctggatcagtcagtctctagtgcaaacaaatacgtagttggatgcgtatacggtacaaacatttgcgagccaaattgatctctccctagctacgaaacaaaagcacagctcgtacaactgcagctgccttaattgtcgatctggccaaactaatcatggcagaaacaggtagaggcatcagctgatcaaacactggccatccatggaacaagatgctttctatctccctccacatatatattagtgcaattttagtgctaattatttgtaaatgctgcctttagtgtgtatattttccttgtcttatgtgtcattatcaaatattcccagccaaactcaaattgctcagctgatggatggatggatggattgagaaggaaaaaaggaaaaacaaaaaatctttaggtggttatgattttggcggcacaacatgacaagatggcttttgcacggccggtgcctccctaagtgctgttgcatgtttgtttccaatcacaaggtcagatatattctatactcttgttcctttcatccaatattttccttttttttttctctcaagaaaaacactagctcctttctttctttctggacctaacatttcctcatttttcttttctgttttgcatgatcagaatttttgttttcacaaatgcaaaaaagcttatggagatggtgctgtgctagttaattagcagcaacacattgacatgtacatagacggtgggagtgggaccacagggtgacggctatatatattccagggagcaaaagaaaacagtgccaggaaacaaaacatcaacctctgaacaatatttccagccaatgatatgggctgcgtacgatgctgactcatctctgatagaggctgatgataagtatttccaagcatccatgacatcatcttcgcatggctatctccattgatttctctctttcggcgcagtgataatgatggaataatacatgacataaacaccacctgcctctggttttcagaaaatcatctggtttagtctctgaaagcagcactgcaggtgacggccggtggatttcttaactttgacaggattaactttggattgtttgatcagtagctggagtgctggatccagcatggcactttggatttgccaacttggtattttccttctccaaagtagttgatcatgtggaattcttttgctgcagatcactgtcatcagcagccacttgactgattgaatattcagggggcatgcacctcctttatctgtacctgtggctctgcagtcttcagaaactaggccctctatgagcaatgtcagcaggtgtcaaggctaccatacttctggatgtttaaacagtgagctcatggtgaagtatatgaggtttacaaactgttggtgatcctatacctgacaaaaaatcgcaacagacacttcaatttggcgttcagcagcacaggtccaggaagaaaaaatgacacctgaaccaacatattatattgtggtgcttgtttacctggacttaacacaaaaccattatatcagaggagaagttactttcatcgtgttgctcctttcactcgattagattcagcaaaccttttgatgtcctgaagaaacattgactgcatccatactattatccacttggcattacaagtgcattatgaggtaagatggacagtaccttttgtgacaccttccccattgtatagatcgtcgaatgtgccggaagatgccatggcagcctaactggtatgagatgacctgcacctgtagggaatattgaacaatcatgttatgttatatgtaaagccaagcaacaaaagaaaaggcagataatagtatttttacactgaaaattaaacttttcttccgagctacactcaaggaaaaaagaatgaaagatagggatccaaggatgatacttgagagcaattatcgatgcaataatttcacacagaaaaggttctgtgggtccagcaatgcaagaatgctagacacactggtccagccaccactaccatgtgcctcatgtaccagttggcattttggcacctaatgctaagtttccatgttcactgatcaaccatttcagcgataaattctaccacttaatctagattatggctaagcaaagcgctaaccgccaatcaagagcagtgtcagtctgccattgctttcctaaccgctgctcagcaatagaaaatatatcgacagaagaaaggctggtataaagaccgccatcttttcaagcacccacaagactttctagggaagaagcctctctttctttctttcgttctttcttttgttttcactttcttttcttcttcccatcctgatcttcttcccgtcctgatctggagcaatggcgacggaagaagaagcaagggaagcaacagatggccaggtaaccaatggcttctcgtagtctctgagttttgtgcagaacttgcttgtttctgtttccatgcatgcatactttctgcatatgcaaaactacgtagagagctccagtgttgcagaaatcacctgaatggtgatgagctctctatgtatcagctaacagactttggccagtttgcaaggtaaatcatcagtgtttcttacttgttgctccatgatcttcttgagcatatatgtatcatgcccagttcgcaaggaaaatcatcaccgtgacttcttgttccatgatctcttcatgttaatctccttcatagtatctatgggatgttctttgcttttgaagggttctatggatgctcttcatgtagtatgccagcactgagttcatttgtgttcctaaacaatcttaaaaagcaaagcatgggcttaaacgatgcaataggttagcgcacagtaattagtaatcaagtttcgctttggtttatagcaaacagaattaagacgccgatcttttcaaacttaaccatttcttgattttgttacataaaagttagattcgtttaaagggatcctatttttcaatatgtagcctattgagcaagtataacaattgtacactcttatccttttattttcgaaaaaaaaatcactagcagtactcttttacccaacttggttattccttcattaatttcgtgaagaaaaaaagaaaacagtgtcattcaaaagtaaacttctatagttctactttacctgtatagagaaagcaatacattaacagtcagaaacagtacaaaatggtaaaaaaatgttaatcagaaattggcagttacagtgagcatgaacagtcgagtgtgtcaatgtaagacaaaggcatgatgtgagcaaagtatacttgaagcatgcctaagcatatagttgcagaactaatcaagtagtacttaaatatatgcacttcacactcctgcaatcttgattcattctagaattaatcaaggctcctaagaggctaagataggcacaacgttttccagttaggatgtccacattccagattcagaagcaaaactcttcaattaggtgtgccacctggcttagcatgtggcattgccatattatttaataagtcagactgttctttgttgactagttggtgtactagaaccatgaaatagatactcttactgtcttgcatgcagtctgactgaaccagcatgtgccatcaatgtcattcattggtaaaaacatagttgccatgtggaaatcctttctgtcatgctggacagtggacactttatatgtagggtttgtaatgctgtattatcattatgttcttggatgtccctttgtacggattataactgaaactgaacaatgttaatagatagttgaatatgtggatgcacatttcagtttatatgcgggtagtcattatcaattcctaacttgtgaataaacaatgtacatgtcataatgacaacccactgtcacatgaagtgtatcagttttatatgttcgattaacctatacatttcccaggaagttcaagtggaagctgcgactgatttgcaagcacaacttgacagcaagctttcttctattaaagagatcaagggcgaggcacaaaccatgggttcaactgaaggaatattgaagattccagaggacgaagttttagtagaagcaccctctgaaaccaaaattccttcagaacatagtttaaatggcacggcgtcttctttgaatggtcatgtgaataaagaagagaatatttcaaatgagcagccccatgaaattaatcaggaaagtcaagagcaggtagaaacttcatctgatggaacaagtacttacccgagcaataaaagcaatgaagaagagatgactgattctcttagccatggagagagtgcatcagaagataccaccattctcaaatgtgagaatgcagaggccaaggatcatggccaacaagatgttgaaggtcatgtaacgaatgacaccatggtgcaggaagaaatttgtaaaactgatgatgctattgagcaaacagttgatgctcaagatctggattcatcaaaagaaagcaaggaagcacaacctgcaatcatgacagatattcctgccgatgaggttctagctgaagcgccggctggaatccagtctcctctggagcctaatgtgggtgactctgacaccgttccaggaaacaaagaaacagatgatccggctaaagaagatgatactgcttatcttgaccacaaagagagctttccagaagataaagttattgcagaacatgcagatgaagaagtcaaagcagaagatcaacagagtaagcaagccgatgacatggatgcagaggtgttacaggaagagatacctgaaagcaaagaatctgatttgcctgaaactgaacaagccgaggaggcgtcagttgatgatcaagaagctctgaatcaacaaccagctttagaaaccaatgatagtttgtctgtaaaagctgaagaaacttgccatcagagcaatgtggccacttgtggggagaaaactccagaagatgatgcgactacaagagagccaactgttgataccaaagaagagcaaaaccagggatcagtagaagaaatgaaagatgctgaagcagttgatactgaagaaacagtgcaacaaagcagtgttgcttttgatgaggcaattcaagatcatgcagcaactacaaatcccagttctgatatacagagcattgaaccagaagaaaccaagggccctagtgatgtcaaagccgaagaagtttccagtcagagcaatgtggcttttgctgaagatgcagttcaagataaggtaataccaagtgagccaccagaagatatacgaccagtgaagaagttggaacaagaagaaactaaggaagctgatgaagcttccaacgaaacgaactctgctatcttcagcgacttaaatcaagaagatagtatcgtggcaagtaaacaacttgagacagaactagcagaagaggctgctgcctttagtaacttagatcaagaaggtggtatagcagacagtgaatcacaagtggcagacctagaagaggcaaaggaaattgaagccactgaaactgaagaaatcacccaccaaccccctgctgctgtttccacagaactgccaaaagaagataattcaacaagaagtgagccacataatgatgatattcagcattcgctggaacaagattcaattgaagtgaaggatactgaagctgctgagattcaagagatctcccaagaaagaactattgctacttctaaggaggatgctgtggaagatgatggtacagcagaaggaccaacctgtgtttctcaagaagtacaagatgtagaatcagaagaagtcaaggacaccgaacctgataatgttgtagaagcatccgatgtggtaactgtcgatgacgaaggacaagaaaacaatgtgctgacaagtgagaatattgcggaattgcaactgcagggtcttgaatcagaagaaatcaagagccctgaacctattgaaacagaggcaggtttccatacaagccatgctgctccctctaatgatccagttgaagtgaatacaacagcatgtgagacacaggacacggagtcagcagaagaaataaaggaaaccgaaggcactaaaactgaatcaattccccaggaaagcaacatttctgtttctgaggaatctaatccagaagatagtataacagcaagtgaaacaatttccaacactcaagaactaactattgcaggatcaatagaggccagtgaggacaacatagatacaaaaactggagaaatcactgatcaaagtaatgaggtttttgctggggaggcagctcaaggagataacatacctgaaagtgtgtcaactgctgatacacaatcaatgcaggagctggaatcagaagaaatgaagaaacctgaacttgttgatttgagtggaacatttcatcaaaaggatgatgccatctctcagaagcaaaaccaagaagataatccaaccacatgtgagacgaatgagattggatcaaccgaagtgagcagtgttgaagcctctgaagatcaagcaattgcccaccaaagtaatattactcaatgtgaggagcaagcaacagaagaaagtattacagaaagtgaaccacaaatcttagaaattgaatcagtccaggatatggaagacactgaagctactgaacctgaactcgtttcagagcaaaacattgtttctacttctgaggagtctgttccagaagaaaatgctacaacagaagaacctgcttttcatgacagagaaatacaaaatgatggagcagaattaacagagcaacatgatagtgtgaaggccgaagaattacccaaccaaagcagtggggctattgttgaggagacagctcaagaagccgatttagtagcaggtgagccaatcgatgatgtgcaagaaaaggatcttgaaccagaagaaataagtaacactgtagatggtgaaacaggagaagcttcccatcaaacacatgctgctgttgaagataattggacaggtgaggtagagagcagtgttgaagcctctgaagatcaagcaattgcccaccaaagtaatattactcaatgtgaggagcaagcaacagaggaaagtctaacagaaagtgaaccacaaattttggaaatggaatcagtccaggatattaaagacactgaagctactgaatctgaaaccattttccagaaaaacattgttcctacttccgaggagtctgtcccagaagaaaatgctacagcaaaagaacctgcttttgatgacagagaaatacaaaatgatggagcagaattaacaaaggaacatgatggtgtgaaggacgaagaaatacctgatcaaagcagtggggctattgttgaggagacagctcaagaagccaatttactagcaagtgagccaactgatgatgtgcaagtaaaggagcttgaaccagaagaaataagtaacactgtggatggtgaaacagaagaagcttcctgtcaaacacacgaggtagagatgacagaatcatcagaacagatgaaggacactgaacctcctgtacctgaaccagaatcatcagaagagatgagggacactgcaccaactgtacctgaaccaacactccaagatagcagagttgctagtgtagaggaaatagaaacacacaataatgcaacaattgaacaaaatgttggttaccagcaacttcaggaacaagaatcagttgaattcaaggaaactgaagttcttgaacctcaaggagtcatcccctctcataatgtttctagctctgaggagttcaatccacaagagactgtaacaaaagaagaaccaggttctgacactcaagcagaggaatcaccagtcgtaattgaagatactgaagatgtaaataacagtgctgctctttctgagaagatagctcctgaagagcatgtactagcaactgagacaactgttgatacaccaccagttcaggagacagaactagaagagagacaaaatattgaatctgttgaagcagaagataatatagcagcaagtggccttccaggagaagagatagacactgaagccatagagattgaatcagtccctcatgagagcaccaccacaagcgtaaaggaactcaatgaagatgtgaaaagcaatgttgctcttgctgaggaggcagcttcagaagaacatatactagagactgaagtaactgttgataaatcatcagcgcaggagccagaactagaggaaatcaagaacacggagccagctgaacaagaacataatataacagaaactggcctgccagaagaagagatgaaggacaatgaagccatggaaactgaaacagtccctcatgatagcaatattgaaagcatcaaggaactcagagaagatgatatcataacagcaagtgcactggatgtttatactcaacaaatcccagagcaagaatcagttgaagacatgaagtgcactgacaccacagaacatccaggagaaaccccagaaagcattgtgtctacttctgacgagcttactaaaacaggagagatcacaacagtaaaggaggcgacttttgacactcaacaagcgcagagtttcacagatcaagaaaccgatctcagtagttcctccaatcctgaagaggcagtgcaagaaagtgacttagtcaaaagtgagcaggaaactgatgttcagcaagagcaagaactggactccacagaagaaaccaaaggcactgaagattaccagcaaaatggagtttctacctgtgaggagtcagtgactgaggttgagccaaacgttgatgatcagcatgtgcaggagaataaatcagcggtagaagtaaaagaaaatgaagatacagaaactgaagaaatatccaagcaaattaattttaccacttctgagaatggagctcaagaaagcagtgaacaagaagccgaccaacctttttatgtccaacccgtacagcagcttgaattaaccacagatagcaaggacaatcaactcgtagaggcagaagaaacatccagccaaagcaacattgtcacccctgaagatccaactgcagaagatagagttgcatatgaaattgacccatctgttgatattgatcaagggcatgaactagaattagtggaagaagtcaaggatactgatgccattgaagctgaagaaacctcccatgcaggccaagcagtttcttcagcggagaaattttcagaaagcaatctatcagctgttgagttgactcatggtattcagcaagtgcattacttggagactatggaagaaatgaagggcactgaaggcacttgtgatgaagaaatctgctatgaacagacagctacttcagaggatccatctccaacagataatggaaaatcactacaagattatcatgtagaatcaaatgaagaaaatttgggtaatggaatcggcgatgtaatttcagtgcatgaaaagatagaagataatatacatgagtcagcagaactgaaggtatgttcaaattaagtatcaaccaatgctttttctcatccatctaaaatgtttacaatacataaaatagtaatgcatattttaggcagtgctaactgctaaattttataaggactgacttctgaagtaaatgatcactaatgatggtttccatgattcactttagacattaaaatgaacaaacttggtatatctaactttgccacaatgctgtgtatagtagtacattattggtttgttggttgagtatattgtcagacaagatgtataccaaacaataccaagttttaaactactggttacaaactgtttagttaaatcaatatggaaagtttgagaaaacacagaggttgtacattagagttcaaaagctgcaaaatagactgcagggtgaacagaggatgcataaatatttcttgccacgttgagtgaaaattgcactatatgatcaaagttatgaactgcaaattaaattgtaaaagagtgttatatttgagtgctataattgtacaaaccccagtagtctttttcttttaactcggacttaagggggccgctgcacccaagagagttctatcattctgaattccgaaatatgcatctagttctttgaattttaggacttgcaggacaactcactagtgtatttcatacaggatgaaacatctgaattgggtgaaaaaactcagatcagtgcgaacagaattgaggaaaatgatgatcacatttctactgaagatacagaagagacttccaacaatacaaatctagtcaaagaagggccaaatgaacatggttcaagccagacatcaaatgttcaagataataagcaacttcatgatgttggacttcaaacacaagttcgtgaaagatcagtggatattgggcaacaagatgaggacatgaagaacgttaacttggatcaacagcagaaggaagatgaagaaattgagaagcagaaggaagatgaagaaattgagaagcaaaaggaagaactccagacagatgaacagaaacatgatgacaagagggttgatttcatcatagacacacaagtggagtccattgatgcatttcaggtgaatatctctgatactaactaatttcatgttctattttcatcaaaatctcttgtaaccagaagcacggtgaaagtaagttaccatccaatgaaattttgcaggctgaacaaacagattccgtggttactgaaatgctcaatgatgaagtaactcaacatgaacccgaggattccatcccaagaactacagatgcgatggttgaaaacattacggaaataaaagaagagactgaagaagagaatggaccaaatagtggtggcaccttagaggtttctgccaaaaactataatgaagatgtgcatgagaatacagaaaaggatgcagtggtagaaaaaacttcaagtagtgaacatgatgaaatagctggtgaaattagaaatgaagaggtcagtacagaatttccattgatgcaatgtgacaaatttagacatattctagttcaactaactgaaaattgttaattttccaaattagaaatgtaaataaaatggtaaaaaagtttttcattatacaggtaacttatgtcactgtgagtatgatgggtgagtaacattgattagcaagcaactaagaattctttttagcactatcatctcattcttttgatttcttttggcaatacaaactttgaagcattactgattacttctcttagcatagaggattgttatggactaacttttgaagtagaagtacctttaagaaatatgtaaatacagaatgacttatgctgcgattagatttcatatgactaaatctatgctgaacaacatggtttggtgaaagtgtttcattgcctatactgaacaacattgttatcttttgctcaacttgcaggttgaaccttgtttggcatcatctctggagagagatcttcaagttgattcagacctttcaaatgaccagatgctagagaatgtaagatttgttgtagtgaatattacccaatatacataatttcataaacattgaaaataatgttagccaccattttttttctttcgaagaatgaacgaaaaacagtgatcttgagtgaaaagaaatggaaaatggaaaggatataaagttatacaaaataacaaaaagtgaagagagatgaacttgagttttgctactttataatattatttccttcgcagtatatgcatgtgcatttaagtggcagatttatctatgagcttggccatggacccttcttagttcttaacacaaaagacctgcaagccttttgagtgccagctcttctctaagtgaacatttcccagtttctatcaacaattgcatgcctctcaagattaactcatttctgaatatggcatcccaaaagcatagtagctgttatcattcatttactttaatgctatcacataattatcagagtaatgagctgtcctatctgttgtacagaatcctatagctgttccacagaatgatgaatacatgtacagagcggaggaaggatacacaaacaaagtcaacgttgacatgcatgccattcaagaatcagataaagtgattgaagatgcagaagaaaaacaaggaatgcaaaatgaagacaatgttgttcaccatgatgaatctctggtcacaactcaaaaggaagaggcatcccaagtgcatactgatgaacaatacagtgcagacactaaaatggatgataccgcaatttcttatgcagaaatgacacatgaaaatacaagtacagagcccagagaagttgaagatacaaaggaaaagaaaggattcaatgactttccagaatttgttgtagaaacatccaaacaggatgatgttgaccaagactttagcattcatcaccaggtaccaatacacttaacaagttatactcatatgcattcgtgtgatcaaattttattgcagaatcttcttgcagtaaaactaacatctttccatcattcaggttgaagatgaaaagtcggcagaaacagagaacaatagcgcagaatctgaagctgtgcaaccaaaacttgatataacgattgctgagacaaataatgacaataatttgtctacaatcaatcccttgcctgagcatgaaacagaaaatgcctcagatataaatcaaaacagacaatatcaggaagcaaccaatgaagatgctatcgacaacattgaaactggtcgtgtcgagaaaatggagacaagctatactgcaacaactgaagtggtcacactcaatgaagatatctgcgataaggtcagaagtcaaaactcattatatatgttatttaagattaatgtttagtccttctaagctattttttactattccatttaggctagtggagctgatggagtaccacctgatggaagtcttaagacatctgaggacaaccttgatgtttcatctgtagttacagaatcagagggagaaaatattaacaaggagacggaagatcacaagcttgctcttcctgtgcatcctacacaggatgaaaacacaactgagcagggatttggtttggaagatacagaaaaagagtccatgtcaccagagaaggcactgcctgctgaaccagaggagcaagaagagaatcaagtaaccaaagaacaagatgaagaagacaggcatgatgcagaacttggtgatgcacatgaagaagatcacaaagaagctgaacaagattatttgcctgtctctagtttcctgatgaacctaatattgggaaaagacaatgatgatccaaagaaagattcagaaaccgaggttgaaaaggagcaagaagaaacaacgaaggatggaagttgtttgatcgcttctcaacaagaagaaaatttggtggcatttcctatagaaaaatcggtggatgaaaaactcacctttgaacaagaaaaagaaaaggtagaaggctctgaagaaacaaaagaaccagtaaaagaacagagttatgatgtcgagatggacgtccaaaaatcattggaaactgatgaagagctcaaaaggaacacttgtgatttggaagcaccagtataccaagataatgcccaggatgaaatttctagcaaactgatatcagccaaggcagctgatccgatcaaaaaaatggaagctagagactttgaattggatgaagagtcatttgatacagtttgtcaggaaaacgtggaagcagcaacagaaattgaagacggaagcttgaatagggaccaagatgacataacaagcccaaaggcttcacaagaggatgctttggaggaagtaggaacagaacttccgcatgagtctttacatgaaaatagacatggtgcaaaggatgagcaaacactctccttgatagaacccgatacaggcaacgctgaaaaattgcctaacgaggctgacagtgttcaaagccctccttgcacagaacaagaagagtccattgaatcttcctatgttgaagtgagaagtactactgagggtcaagtggagagtgaagtaatagaaacgaatgaggaggaccagcatacgaccgcaggtggacatactgaagaacagatagaaaatttacatgatgataagtcgaaagaaacatgttctgaagaaatatctgatgagcaggcacctgaaataactgaaccagttagccacactgatcgaaattttgcttatgaaaaggaaattcctgcaagttcgacatgcatggacaagaaagagagtatgatctcaaacaatgaagtcagcaactttgaaaaagcccttgagacacactcagatagtccaaatttgcatgttaaccaagataagaaagatgaaacagctgataaccaaactgtggtggaccataacaccgtgttagacaagcttgaagattctaatcggcaggaggagcaggaaactgctgcacagaagttaccaaaagaaactgaaggaaaccaggaatttatggcaataacagagcctgtgatcaaagaagagaatgtacatgaaacagttgaaggtaacactcaagcagtgaagataaaatctaatgaagagaaagaactttttgattcacaggttcaggaacgtggtctcaatgtggtttcacccaaagcaacttctgaggccgacgaaaaatttgtggagataacaaagccagaattcagcacagatgaagaacatagtccaaaggcggatgaatcaaataagccagacgagaatacttgtgatgagaaaacaaaggctgaagaggaaactaataatatcactgatgaagcaacagtgaaaatagaagaacgaggagcagaacagaaggtatcacataaaaaacataacattttgtctggtgttggatcaaaggtgaagcatcaactagcaaaagtgaagaaagccatcataggtaaacctgggcacacaaagtctgaatcaccaaaatcataaaattgattcaccttagagcatgtaattcttgtacaatatgtatttttgtaaggaatttatgtgaggtgtaggatattgcaatgggtttagtgaaccatctgtaattttgtatgaacgattcattcaaaggttgtgttcttaaggacgcttgtaaatataggcaggcagtgtgtagttcaagtttccataaactttgtaattgtttcaccaacttggtgtgaggtgaacaacatgtacatggcatattgtttttgttacttcctcattgatatgcatgtgttgttttgtggtaatcatgcaacatattctacacttcttcatgaaaccatgtgatgttatgtggtgttttgctctgaatctagctagtgctaaaacatagtaggatgaggttttacatgtgaatgaatacaaagaaatcacagttcagactccttagagaaagaagcaactactcatgttgctgacctacgccttcatttggataagcaaaatgaatgctggacagaccttcgctacagaaaaagtacttggcctctacagttagcattctactactacgagtagtagaaaaatgctgaagagaggaaaaaaagaagatattgtagaacctaacctgatgtgaggcgataaaccttaatttttcccattgccagctcaacattccacccacccaccatgacaatcccaaacgcaggaagcaactttggattggcactgcatctgcattgcatacagaaaacccatccatcgcggattctgcaggatccacggaccacggtcctccacgcacaatgctctccatccccgtcgcgggcgcacacccagcggcatgaaatgtgagagcgggcggcggagaactatcgtcgagcaggtggcgggcatgccgtggaggagacacacggacctgctaccgcaacggcgcttttggcacggggcagtgctggcggccgcccgccgtcactcgttcttcaccccggggtagcccccggtttcacattgcgctcgtcccctcctctcccgagcttggcgaaggcggcggcggcggcgcagccatgagagcgggaacagccgggaaggcgaaccaatcgcaatttccccattaaccttgttcgccatttacggcgacgcggcgtatggccccgtcaccgtcaggcgtagtatgccgctacggacaagagtgttttgcacataaattcaaatttcgttttcatattataggatgcattttgatttgcggagtgttcaaaaattagatttggtcaataattcttgtacaattgatatttaggctgcgtttagatccagggtgaaattttttgccgtgtcatatcggatatacggatagacatttgaaatattaaacatagtctaataataaaacaaattataaaatctgcctgtaaactgcgagacaaatttattaagtctaattaatccgtcattagtaaatatgtactgtagcaccacattgttaaatcatagagcaattaggctcaaaagattcgtctcgcaatttacatgcaatatgtgtaaattagttattttttcgtttatatttaatactccatatatgtatccaaacatttgatgtgacgtggtgaaaaattttgttaggggatctaaacaaggccttagtagggtataataactacaaaaccaacataacaaaagttaaatcctcacatttttcataatatatacttgcattttgcatgcactaacgtttgaaatttgttcgattttcttttagctaggccagaaactgaccttggtgaattggtacctactccctccgtcaccaaaaaacgaatagacatatcctagtacaacgaatttggacagggatatgttacaattagttgtacaagatatgccacatccagtactaggttggttttttatgggatgaagggagtagagaggaaaatggaagcacgggtgatccatttgaggccaaaactcgacttaaattttgaatttgaaaataaaaagacatgtgaaaagggagcttgtacattagcttcaagtacatgcacatttttctagaaaaaaagatgtaaggagagcaggggttcaaaactgaaaatgcggtagcaacaggtgcatcctctcgaaagctcttgcacaaccaaacttcaaacaaacagtacaagtaattccaaacgagcacccatattcagacttcggagtaacccattacaacgagaattgcagattttgtttcacgaacaaaatcaagataactcatcccttgtgtcttgatgcaggtattcggtcacacatctcatgaacagaatttgcatatggtacacgcagccagattctctcagaacatggctaaagaaagattgattaatcaagtattccccatcgctaacattttcagtttttcagactttcagttaatttattgacaaggccttgcaagtgactattcacgtcagggatgttctccatgttagctgagcaacttgaaagcactcgtgctcgtgtatgagtcgatgagagtattccaccacgacaccagaaaccaaaattgtacagccagcacacttgcgagctaggacactttgtgcgagatttttatgtaattcatgagcctgctcagggctttaccgctgtcaatggcttctcttgccctgtcaagtgcggacttgatatcctcagctccagtgcagcctaagaggtggtcaaccatggcagcatttaggactattctgtcataggctggtcctttctccccactcagcgctgccaaacccaactccaagtttttcaggacctgattcagtccggagatacagtaagtaaacattataactatgctaaaaatataatatcctactaacatgtcagggtgatacacgttaatacaagggtaatttggaacattttacaaagcattaacagacttgtatggatgactgccagcctctattggaagttgacggcatatagaaatatgaaactaaggtagaacaaccgcaggcatgggcaaaatggcttactgatctatcagttcgtggagtctcagtggattcaaaaccaagttcctgagcattcacaatgacactgaagccctctctagaaatgcctgaaagatgattgagacaagctcaggctgaaattatttcataaccatgttattgggcatttcaaaacaagcaatccagattagtcattcacaaaacctctttttttttaaaaaaaatatgaatcaacttccaagatgtataaatcttaaatttttgaaaacactgaacataccccatcatcaccaacaaacacatatgatcactatgaagaggaatatttataatcaataaaaagcgaaatatctttaccatcagtctcggagaaatctgtgctgtttggtatccggaaccctgagcaatggttcactggaagtccttttgatgcatgagcagatctttctttggttgtcatagaaagcgcaccctcctcaccctacacgcgcaccataaatttgagaaatgaccatgtttaattattggatttgcattccgagaataatagagaagggaaagaagctgtttgttcaaaagttcaggagaatgacctatctgtcagaaacggaactcaaaatgttaatagcgcaaggcggccaatttctacatatgtggtcttagcaacaagtgcacaaataaacccataggctgggttatatggggcaagacatctaaacagtaacataaagcttaaacccgccatataacacattaacacaagataatacctttacaactagtccagcatgaacagttctcctcctcatgagcataagcaatggatcttcatagcccacatgataaaatccagcaaccattgattctcttcctcgcgcctggtggaaaatttgaagacaaataagccaatcaaccagtagtatttatttaagtgagcagaacttgtgacatttacaacagaaacataattgaacaaggaaggacatataataataatgcattcatctcaaatttacaacaaattaacaaggattcccaaatagtaggtgatacagaacagttatatttttacattcaatgaatgtagaattacaagaaatatctccagtcttcttgacttgtagtcaaagagttttttatgcatacattatgttgaggaaacactctgaaaatgtaagctactaaactgccaaacattttactaagaaatgaagacagtaggttgtactaaatatttaaattagtagtttatcaaagatctgccagcagtgaaatgtgaccaattttatgttctacagtggtataatatgcacaaatgatctacaatgtatatataaacataaaggatgctacaaaagttataatagttgtacccattatggtgctcttatgatactgtcttccttacaataaaggactacaggtggatgagaagagttactcactctcacaaattgctgaactttctcagaggtagctagcggtggccgtttcttaatatgctccctaagcccaataatcgaatatctggaagaatagtgagtaaaaagaacacattttcatacattacaactttcaataaattgttttttaaatgaagacaaatattataaagcggcaacatttaaactgaaagcataagtttcctgcagttccaaaaaaaagtaaaggcagtgattccattttgaaaattttactgctaaacttcatggctgtgtatggacttaagtcagatattatgatcagttttcttcagaaaatcaggctgaggtgccattcctgattatctgaatgtctacaggaatactatatcaacaagacttggtcactgaagcacataattaccaagaaaatgtcaaaacttacaatggtgggcaagcttcttggagacccaaatatgcaaagccggtattctcatcctgaaagcaaccaaaacagttgatataattagatgcagtcagaggagagtgcacaaaaagggttgcaggaaaattaggcagaagttcatgcacacctccagtagtgttttggcctgtaatgtggacaaatgtgtgtttgcacccatgaatttaagcatctgaccttctgttatgcctccctgaaaatcttgatcattaagtaatacagagggttttcaaaattaagtgataggtaagtccatctcctaaccaaaacttccatagcattaaagaaaaacactagtgtatgatgattgttgatgggtatgcttttgtactgaccttgggtggcatccactcaacaccatggaggagacaagcctcaccatagcaggctctaacagctgcaacaaacagagtactcctgaaaaagcgtgtatttccatcatagggctcaccatagtgtgtcaatgatttgacatcagcaactggagttggacctgatataatgtggtgttaatgacactataatttttttatattcaatttgagaaagagaaactgacttgatgttacctaattcatcatcaaaggctagacaatatcctttgagctcgcgatcagtctccctattcatccgctgtccaataagaaatgctgccagcagtgcttcattaaccatagttgaatttgcactggctaattcaactggtagaacatcctttagtacaccctgaacttcctcataacccaaatggccaccagcaagaacttctctcaaagcactgacaagtctcatctctgcagtgctttgaccaacataccgaggtccagttaaaccatttgctcccatgattgttccttccggatctgctataaatttcacctcggggggaagaacattgacaagccgtggccaaaataagctcatggcacgacgctcaccctcactccattgggtggcttctggaaaggaattagctcttattgtcatgccagcgaagaatgcacccagttgtgcactggatactggctcatctttgagttctcccattcctacacaagagattataagtaacatatatcataagattgttatggaaggcaaagagtcaatgaaaataaaccaatcacaaatcagacctactgtaaacttgtcactcaaatacaaccttacaagcaaattgtaaaaatcagtatccaaagtcaataaatgtcccaccgaaagtttagtattacactccggagtacaattgagcataaatcgcgagctaatgtttcacaaaaaagtgctaaactctagaaagctccatttcaagcaaaattttgcattcctagataaaaggagatgagatgttactgcaatcatcataatgtggatcaaaactaaccgcagtctacatattagtgtcataggactcgagttctaaattccagtagtgacagtgaaagcagcagaatttcaatttcctgccgcacagacggtggctgcaacgcaggatccgatcgatgctagaaatcaccaaagctgaagcggcgagagtgcgaggccacccgccggcaaggatggcggtgacttgactcactcaccggagcggaggatggtgtcgaggacgcgcatggcctgctcctccccgagcgggcgcgtctgctcgggccccgtgcacacccgcgcctgcgcctccagcaccgtcgcgttcggccgcggcatccccggcggccggtacgagtccgacaccgccgggttccgcctcaccccctcctccagcaccgccacccccgcctcctccatccacgacgcctccgcccccgcccccgccgccaccaccgccaccccgcgccgccatctcccgcgcccgccgaaactcaccgccgagccaaccacccgccccctccccggcgagccccgaccaccgctcgcccccgcgctcgggagcggcctgagcagcatcgagttcatggcggagcccaaggtcaatgcagccgccgagccggaggaacacgacgactatattttttttacattttagtcctttccgaaaaacttatttataaataagggctctatggcttattcggtatgattgcaaataaaataatttataaataatatatatatatatatatatagtaaatttgttttgtgctccatggtgtccgggcaccattgttgaaattgagtatatacccaatttaaatgagtatgaatctttttcagttacttaggtattaacattaaccactttactaactagttcaaagcaagtttgaactgaatttgaacttgtttttgttagattttgattctaggtatatagcatctatacatataattagttaggtatgtaatcatggattgtgaaataaagttaaatttgagttgttttgttgataggtataggtatgaatcgaattattataactagatatatactcacaatttgaaaattttgagtgattttgtgcattagataccatggtgcccgggcaccatggtgccccatatgagtgtcatatatatatatatatatatatatatatatatatatataaacaaaggttgaaaaataaacctcgaaaaaaaacactctaaatttaatattaaaataaaaattttggtcagtaaatataagcataaatgaaaatgcgagagaataagttttaaaaagaacaaaaaagtaaaaaaaatacaagatcgaaccggatgggcccattggtcaggattgcttggagattcgtgcggggacgcgcggggtgatcgggggatcggacggcggggagagggggaggagccctcacaaagcgcggcgccgcctccatttcttcgtctcctctccacccatccccatctctctctctctctcgctctcgctctcgccgcggagcttggaggtttgggtgagatcggagcagcgaagcggaggcagccgcagccatggcgttggccgctcgcctcgtctcccgctcccggcaggttcgcatctcccttccccgtccccgtccccgtccccccgcgcgcgcacgcgcgccccgccgcggaaaccctagttttgaggtagatctgatccggcggcggcgccgacgattggttcggttttgcgtgggatctgtggttggttgcgttgaggggttttttttgttgggatcgattgcaaatttgcaatggtgggggttggatgcggtggctgggggtgggtggcgtttttttagtgcgcaagtgagtccggtgcatttcgtgttactgttgattggagcgaatgggatgatgcgatatccttcagattagaagggggaatgctcctctgtgaggggacaaacaagggaacggtttggttgttaacatcccggatcctctcaccacagttgcaatttcccaattcagcatcctcccacatataacatttcatgattcggtactggtcaacaagctatggaaagcttggcgtggacactgctcaagcacattccaggctattatttgttagtatgttttctttgagcagtatatgtcttgttgatgtgtggtcattggtttattggtgaaatttatatggtgacaatgtagtcagccagctaacattagaataggttggctgaagaagttattagtactccctccgtttcacaatgtaagtcattctagcatttcccacattcatattgatgttaatgaatctagacatatatatatatatctatctagattcattaacatcaatatgaatgtgggaaatgctagaatgacttagggcccctttgaatcaaaggatttatgtaggaatttcataggattcaaatcctataggaaattttcctatttggccctttgattcaaaggattgaagctttccaaatcctatgaaattcctatggaatgacacattgcatgtagattttggaggaaatttagcaagagctccaacctcttggaaaatttcctttgagtctatctctctcatctgattcctgcgtttttcctgcgctccaatcaaacgaccattcctgtgtttttcctgtgttttgcaatcctctgttttacacttcaattcctgtcagaatcctatgtttttcctattcctccattttttctaccctgcgattcaaaggggcccttacattgtgaaacggaggaagtatatgttatgtaataaggacgtccatgttggtaaagttgtcagtacaaagctatatggaatgttttgttttagaaatctctagcttctctactttttttataactttgtttatgttaattgtcattggttaatgtctctggcttctggcagctatactctgctcaagctgccttggcaaatggaggtgccactcaagtccgcttgtatgccaaggaggcagatcgtactcccgtcaatggtgatggtaagcctcttaaattttaagtgcatttaacaatttattttgtgcaaattctgtaggaatttcaaatgcttttaatcctaactgcaaaactcctttccataagaccattgtgttgagctgtagaaaaaaatgctttctgtactttacctttgtccatcgcagtatcacaagtaatgttatgtgtttttatgtcattcaaaaaatgtttttcaatgcaaaactgaagagattacatatgttcatgagttggagtttgtttgattaaactctgctgtgtagttctgattacttctgtatttaagttgcacaatttactttgtattataattttggtggtctgattttttttttgtatgtatgaagacctattgaagggcatattttttgaggtaaagaagaaatttgagactgcccttggtgtacttaagaaggaaaagatcactattgatccagatgatcctgcagcagtttctcgttatgcccaagtcatgaagactgtaagacaaaagtaagatcacttataatctgtcacatgtattcatggtccttagtttattactttcctttgatttgtcattgtttttgtgtttattttacacatatttgtggtgattgtttctattctctagcgtaaagttcttttattaaataaatcagattttttgcggtttacgaaaccttgaattcattaagcactattgtatatttcagtatctatgtagaaataactcccatttgatattacttattacctactactgtttgccggtttgccctagtacaatttttcatcttccccattgatgtaggatgccccatcgaaaataaaaaaatattttacttgtacattaatgcatccatcctatgcagcaaaacatactctggcatatatatatatatatatatatatatatatatatatatatatatatatatatatatatatatatatatatatatatatatatatatacttctatcgagataggcttccactttattgctttcattttgtaacacttattctggatgttattgatctatttactcagttatggttccattgtgtaaatgcagggcagatcttctatccgactctgagaggattaaatataccatcgacacctttacaaagggcatccctgatgcacggacttacttgaatactcttcaggagatcaggataaagtacatctattatcattttcacaattttcatcttatgtttttctcagccccaaaatacccttgtaaagaattaaatcaatgtgatatttgcctacataacaattttattgcactatttgcttgtctgaatattcttctgttcacttaatgttacataggagtggccttatagatgatatgggtgctgaggctatgatgatggaagcccttgagaaagttgagaaggagattaagaagccacttctgaggagtgacaagaagaatatgggtctcctcttggcagagtttgagaagataaacaaaaagtatttatcttcatcattttgttatcaacttaagtttgagatagttcagatcatcatttacactgctcgtctactctctagagatatactttttctgaatatttcagtgagaataaaaatccacatgatagatcaaacgtgcaattccttaagctgcttgcatgataattttctggtttcaaaggcgattcagggcatgtatagttattttatctgaccttgctcactagcaagagttttcttgttcgctaacaagggttaagggaccaaatatactctcagatgatggtgtaaccaactgtagcttgttttttactccgtacttaggtgatcgagatccattattgctggcttgcagggaaatatattgatttttcttcctcctgtgcatgctagatgtgttatatatattttttattagttggactaacctttttcatgcttttttgctttccatttcaaaatttcaaataggcttggaatccgcaaggaggatcttcccaagattgaggaagagcttgaattggaaattgccaaaagtgagctgacggagcttaagaaggaatgtgttgaagcaatggaggttcaactaaagaggtacatctctctttatatactaattggttatctgcttgagttgggacttatcagaagtaataagagttgcagcttgctgcatgcaagctaactaatatccagtgcatatcatatcatgtgtgcgtctctattgaaaaaggttaataacacgttgacgtgctttgttatcagggaggagttcaaagacgaggagatgcctgatgtcaagaagttggacatcagaaacttcctgtaggccataaatctctcaaggcattttgaaatgctcggacactccataatggttttcttttccagtgacagccggcgctgtaagcataccaatgaatgttattcttgctttttgtaataaaaactgcaccgaagtacaaagacaagtcaacggttgagttggattgcttgttaccttcctgcgtggagaattttgttttttgtattggcaatgtgaacgccaagcagcttactgtctccctgatgatgcacctgtgttggtttctctgatgatatggacacaccaggttgaggcttaggcaatggtttactgttttcgattacattttgattagaatactttgtttcctctaaaatcattatcctaattaaccgaaggatgcattattcttaagacttgatacacaaattctcagggtgaatttaaatgttagtaggaggattaatctgtgcgcagcaatagcattgccaatcggtaaactgatctggaatgttacgttaaagtggatattatgcgttgggagaattggtaagtacggcctcgggcaggtaatcaagttcaggaataagttcacttgacgtccctcaatttgtcaaaaatattagatataagttctgaaatttatctctaagccaaaatacaagtccctcaatttataaaatttacaaaatcagatcatccaacgtcctagatagtattatgcctgttttaaacttttagctcacgtggtaagccgagtcggcgtgaaacccaggacgacagatgggaccttgaacatctgaggggattgggaggatgggagaagatagtgaagaaagcgttagccactgacatgtggggtctgtgtggtgtggggcccgtgtgggtctcacgctgactcagcttgccaaatcgggcatagtactgcccaggatcttgggtgatcctgtattgtaaattgtcgggcccgttatattggtatagggatgaattcagacttgctgacaagttgagaatcctaaagtgaacttattcgtcaagtttattgcgataaggcccagtatctaatgtaaacatacttgtagggccagatcaatcaaccaatgggccagttctaatccaagaaggcaaggcccagttatagtctaaacatatctgaaggcccagatgggacaaacaatggcggcggcccagaccaatccaacaatggtccagctcaatcttagatcctggctggaaaatacttagattctgcagaaggtaggtgcaaccatcttcattttcatcagccaagatgggacgagatgatcagtagttcaggagaagatgtctagagaagttcatagttcaggagtcatgcagtctaacaaaacagcgccagttttaataggcacaccgcgcacaacagttcatatcatatcaggctggtttgtcacaaactcacaggtacactgaaaatatgaaacgagtatttgaaatgttcaaaatatgagtactgtttatatttttattcatattttgaaatgttcatacaaaaaaaaattaatactcatattttgaaataattttaagaatttttagttatgtttttttattggcaatgtagatattgtccaagaaattaatggtcatagtcaaacagtctcatagtcatcgatagagtgtcagacaatgtgtacggagtctatattattagtgagccgggctaagagtcaaccctttcccttgatccaaaacattgggcgtgagtgatcttgtctcacgacgtcatcgatcgctgcaaattttgagttcgtatacaaagacttggcgtgcgcgatccggtcatttctcgaatcactagcttctctaggactaacctagtgtgtcggtgtaacaaaatagggggtgtgtttagttcacatcaaaattgaaagtttggttaaaattagaatgatgtgatagaaaagttgaaagttaatgtgtgtaggaaagttttaatgtgatggaaaagttagaaaattaaagaaaaagttgcctaagtaattttatcatctttaagaaaataccgaaagatatcatattttctaacataaaaacttggtacttcagagtatctcaagatatcaatttttttatgtagaatttaggtatttaggttgtgtttagtttcttggccaaatatttttttaagtatacggacacacatttaaagtattaaacgtagtctaataacaaaacaaattacagattccgcatataaaatacgagacaaatttattaagcctaattaatctgttattagcaaatgtttactgtagcatcacattgtcaaatcatggcgtaattaggttcaaaatattcgtctcgtaatttatatgcaaactgtgcaattgatttattttcatccacatttaatactacatgtgtgtgtcaaaacattcgatgtgatgtttttggtaaaaaagattgaatataaacacggccttgaggattgtaaaatttccctgataaaatacccataatatttgcattagtttgcgtgcttttgagtttacttcggcatacaaaatattcaaaacaatttggcaaaacggaatggttaaatccacatgtgttacactgacaaatttacttaaagtcaaagtaaatttcagaatagtaaattcggaggagtacacttgattacaagtacattaactaaattgttttattccttgacctgacatgactcatgcacgctagtactcctcccgagttggatcgtaattaaccacgcaactaaattaaccgaagtcgtaattaatgcatgcgattatcgttgatgatcgagattaattagcctaacccctgattaattaaggggttaattaattagctttgcgggtctcgagtccgaatccgaatgggaagagcgggtcgtagtgctcgtcgccgacgttcatcggcagctgctccaccgaccggaaccacgtcctcgccagcttcccggtgaactcgtagtcgccgaacagcacgtcgctgacgccctgcccctccgtccccggcagccacgccgccaccagcgcgtcgatggcgtccatgtacggctcgatcaccagcggccgcccggagaccaccaccaccacgcacctcacgccgccgccgcagacgttctggatcacgctcggccccggcgccgggatggtcaggttcaggttgtcgccgagcgtctcggcgtacggcggctcgccgacgacgaccacggcggcgtcgaacctccccgcgttccgccgcatgaagccggcgtcgggcgcctcggcgaagacgacctccgtggcggcatccacggcgcggcggatgccgtcgaggatggtggtgccgccggcggtgaggtcgttcccggcgaggccctgccaggtgatggtccagccgccgcactggctgccgaggtcgtcggcgtgggcgccggcgacgaggatggagcgcgcccgcttcggcagcggcagcagcggcgcgtcgccgggcttgccgttcttgaggaggacgagcgacttgcgcacggcatcgcgagcaaggtcgcggtgctcctgcttcccgagctcgccggcgaggctgaggtcggcgtaggggcgctcgaagaggcccatggtgaacttcacccggagaatccggcgaacggcgtcgtcgatccggctcatcgggatcgtgccgttcttcaccagcgccgccaggtcgtcgatgaactccgtgtacgtgaacgggatcatcacctgattgcacacaaacattcgaaaattaatcagtcaattaattatgaaatgttttgggtgtaaaggaccatttcttggatcgatatttgtctcttatttatcaatgaaatgaaaattttatgatgaaattagtttttgcatgtattaatgtgtgcactgtactgaccatgtcgatgccagccatgatacccagcttgatggacaacatgtagtctgcatgtgctggggtcgtgatcctgtcaagcccttgccaatccgagataacgaatccctgaaattgaataacacattaattaattttcaaacttaaacagatcacatcatatatgcatgaagatctcacacgtatgtactaccgtctagaaaatagaaatacaagtcgagtttgactaccaattaattttaaatctttgactaattattaaaccaataataatattttacatgcaccgatacggatgaattcatgttcaaaagcacataatctattttaaaatataaatatttctatattgtttagtggagaaaagttgccaagaaaataattgggtgcctctcattgaatgagtggtggttggggggctaaaataaaaagaaatttaaataagaggctattaggaattgcttatattttagaaaaaaataaatactagaaataattatattttaaaactgagactatttttgttatgaccatagtttatttttcataaataaaataacgaaagaggaatttactttcaaagtttatttttaaccatcaaaattaagccttatactctccatttcaaaataaaccaatttagttggagatgtgatataacctagtacgtacgacttatatccaactttagtgtattaagtttatttattttagggtgaagggaatatatatatttgtagacaaaggtatagcatatactacctccatcccaaaatgtagctatttctagcagagtgtcttgtcctaaaataaagctatttctccacatacctcctctcaaccaatcacaaccattattcttcacctactttctcttttcaaccaatcacacactttctccaattattctcatttactttcttaatacctgtgccaacctaaaaaatgactatattttgggacggaggaagtatatatatagtagtagtgcacataccctgaagcggagcttggacttgaggaaatcggtgatgaggaagtggttggcgtgcatcttgacgccattccagctggagaaggacaccatcaccgtggacaccccctgcgccacggcgctgtagtagggcggcatgtgcaccgtcatcagctcccggagcgtcgccaccgtgttgttctcgttcatgccgcgcgtcgtgccgccgtcgccgacgtagtgcttcgagcacgccgccacgctcggcctcccgccggagacgaaggggacgccgcggcggccgccgggagggatctcgccctggaagccggagatgatggaggacatgcgctgcaccaccctggggtcctcgctgaagctctcgtagcagcggccccacctcgggtccctgcacaccgccacgcatggcgcgaacacgtacgggatccccgtcgccctcacctccgccgccaccgccgcgccgatcctcttcgccagatccgggtccctggagaagaacgaaaaaaattgataatttgacactttcttcgttgcccaattgttttaattgatacttgtgatgatgatatgtgagccatctaagtaaatgaaagtgggtcagaatgtcaaataatcgaaacctattttaagaagtgttacactatcaaatctctcggagaagaacacaccatgttcatatgctctcactagctagctagcttatctttgtatattccctccctccggtgatgaataaaatccagtaaaacttttagaaaactattactattggtcttgtgttaaaataagattacgacattattgtatgatgagaaattttacgaacattttaaaacgtaactgaagataccaaagatttttacactagaaaataaaatttggtaacttaagctagctaatatttagatgtaccaaattttacaataaaaattatggtactttatttttcaaagatggtaaaattactcttatgatagtaggggttttttttcaagtcgaatctgtctttttttttccttttcaaattcagcgcgtttgagaaaccattaattagagtgacaacgtcaaaatattactagttggcgagttgggcaattagtaactctttcccttgtccaaaacgttgggacgtgagcgatcgatcgcgctaatttaaaatctcaaatcttggatctcactccatcatcatcgagcactgcaaattttgagagtttatatacaaagacttggatgattaattaatggcgtgcaatctggtcatcttcagtaaacttatcacaactagctacatatgggaatctacttaattcatgcatcattaattgagtttaattaagggggataattaatcattttattacctagtgcagccgaggccgacgttgtgggggaagatggtggccttgtagacgttgccgtggccatggacggcgtcgatgccgtagatcatggggatcccgaggcgcgtcgccatggcgccgcgctgcatctcgttcaccatcgacacccacgccgccggcgacgcctgcgccgccggcacgctgccgccgccgctcagcacgctccctgcaatttgagagatatatattcgtcttaatttaatggccggtttgagtagctagctaattttgattaattaattcattttgaatctgttttagtatttacatttatttatggagatgcatgccctcacttgtgcttgcagtgaaagctaagattcaaaccttgtatttacaaaatcattagtatcttataatatccatatttccatgaccatatcatacggattcagagtgtttgactcccaatctcaccaaactggttcgttagacatttgtctgcattacccattatcaaagtacgaattctttaagaaatgttattttgttatagctagcttaaacaaactcctggccgaatcacaatatagacattcgttcaaacttcaaactttttcttcacgaacgcgtaaaatctttgcatgtcaaaaatatatattagagaacttcagacttcaaactgttttagtttgacctgcactatattatagttttttttcaaacacgcaaaagctttcatcgatattaattagatattatatataatttcctgaggtgtttgcattcgcattctacttattatatgtgtatcttgtttttagatgcaagaatcaatatgtatctctgctgcaagaaccaagaagcaatcaagtataccaatgaagtagttgcgcatgacgtcgaaggtggcgttctcgcgctcgatctgcgacatctggccgatcttctccgccagcgtcatccgccggagtaggtcgtcgatcctcttgttcagcggctgcttcgagtccttgtacttgggacactcccctcctcctccgccgccgcccgccgccgccgccatcgccgtcgccgcaatgcagcctacacacaccaccaccacgagcacggcgccgccgccgctactacctcgccggagtagccccattgctcagctcaggctaagtgagatagagttggatatgaagtgatgagttgatcgatggaagcttaattaggtgtctatttatgggcgagtttagtgacccaagtgaccaagtgtgtgtgtcggtccaaaaatattcatcgtattaaatgtggggctaagatgaggccatcgagctagtttgaatggttttgagtttacttcgacatttaaattgctcagaacaagttggaaagcagggttgttaaatccacatgtgtattatgcagacaagttgcttaaagtcaaactgatgaacttcataattgattcgatcatggtcggtactgtagtagtttggatcctctgacagaaagaaaataaaattgctccatttaagtctctgaagctcctgcaacgcatgcacaaatccctaatttactgaaaattaagatttcttttgcttgtcagtttggacaaattcaggccacctcgcggcttgccctaaattaattatctcctagattcctaattagtctcaccggttgccattagaacatgtaaaatggtcattaacagcgatctcacctttactaattaagaatacttacttattgatacgaaggatagaaagaggagagataaaatatcgttattatgggtaacgactcttaacctctataatataaaagcatggttgcatatataaaggtgaaaaatgaaaaaaaaaagtaataaaagaattttttttagctaatggtgagagtgttttaactgttataaagatacgacttctaaataatcttgtattttctaatggatcatacacatatttactgttaaacatatacttatctcctaattaatcccacgctccttcattgcgtgcacaaatccctaaattactggtaggtttttttcgccggaggtgaagaagatccgaaccgaattacattaagatcatgagataggcttcagaagtcatttgccggttgccacaggctaagattatctcgtatgtttaggcggagctacataaaagggattagagtttctaggcacctggtcaagtggcggagctaggagctcgacacgcctagggctcaaattgaaggctaacaactatccatatcaattcgtacttggaagtgcagtacaagtacgaaaaaaaatgcaagactgaaatacaatttctaaatatgcaccaagtacagtaaaagtgtagaaaaagtacaagactagactaaaattttattagaatacctaatgcgacgtatattcatgattttcactcttcatcaacagaaggtagagaacctgaagatgaatatagaaaatgatattacataatgtaagtgatgcaaattatgagaacttaattatttgtagacaaagcaatgcatgacatacctctaggtaatttgtgcttgcgcgtcctcaaagcacgataatgttgtataatctgacgatcttcaatgctagtaaaaacatcccgctcaatatagcatatcatgcagtgattcatccattcatcattcatcttgttccgcatgtcagttttcataatgttcatagctgagaaggctttttcaacaggcaaatttaaggttaattcaattaagtgatacaccaatggaaaaattctctatcactttgaaccatcttaacagcaaggttaccaaggtcagagcaacttgagaaatccaaatcagatctcacatcagagataaatgtgttaagttggtctctaaggactatacaatcatattcagaaaaagtcatctgcataaatccttgccccgcacctgccgcaaggaggaggaatggaaaggttttttttttttttttggtaggaggaaacccattaattaattaattaattaattaactaatgagaaattaatggaggacaaatatggggccttcgtaggcctcctttctgcgcgctatggcccacacggcccacctagtatcggaaaataagaaatcgatcggaaagaaaaccctagaagcgaagcggagagaaagcaatggcgtccctgagcaagcgcggcggcggcggcggcgaaggggagggcatcctggcgtcatggatggcggcgcatgggcgcgaggcggcgagcagggcgaagaaggtggtgcggagcacggggaaggcggcgtggatcgcggggaccaccttcctggtcctcgtcgtcccgctcatcatcgagatggatcgcgagcagcagctcaacgaccttgagctccagcagcaggcgctcctcgggcccgcgcccctcaaatgatccatccatccatccttaacttctactaatagtgttcttgcctgtctagtcagacaaatcaaacttcttgttttcattaatttcaccattatgctgctctgatgagatgtcgtcgccgctttcctttcctgatgttactatttttcacgctcatcttatcatgccaactatatttcgttctgtgcgattcctgcgccttgtgccgtttattctttctcgtcatatgctgctgtgatgagatttcgatttgcatcgaccagggttacttttttttttatggattgacatctccaggtttatgaacaacagttactataataattaaggttttctttttgtaaaaaaacagtatggtctctgtaataaaaaggagaacattgtactccagtttataaagttggatcacaaatgggaacttatgaagatttcttattcataagagtatgactcgagcaaagcatatgttggtttgttacgcccccgaaactttggcaaacaacaatgtgtgatggtaaccaagcattttgatacaaacagcaccactttattgcattttgatacaaagaacactagtttttattgggtactccctcaaaattgcactcctaatttaatttgaagagtgcacttattttgagagggatgaagtatatatatgcttatctaaccaaaagaacttttacgttataaatttggattcgtcactaaccaaactgtcattgctggcttatgatagattttctggcaaaagaatgacattgctggcttgtgatagattttatgccagtattagcaacaaactgggcagcgactaattctcggttgataaattagaattaatttgagaattcatccactgacccacatatcatgggcacgactgggggcaaatcctcaatttctgatctaaacgataagtccgggtatatgataaactcggagcatcaaatcgatcagcatacctcgaggggaagcattgcaaacaatcacgcaagagaagctgagctgctgctcctgctcttaatgcaggcatggcacatcaaggacgggcatttgcatcataataaaacgtctagccaaagttggataccacacattcttcgtcaacaaactgctgctgcgacaaaacccaaaaccaaaaaaaaaaagcaacctaacggaacggaggaaacaacccagtagttcttagttatgcagctctccctcccttttgacggatcaaaacctcatgcttgcagcatatgcatatcccaccaggccaccaccatggggtggtgaaccatttagtttcttgcgttgtggctccccaaaatgcccctctcatggtgaggaacacgctggtagccatttgatggcctgccactaccacggttgcccgcatattcgttgtcgcctccccctctagcataccctcgccctcctccaccgaaacgacctctgcctccccttcctgccaatgccaaacacgcaccaggttcatatcatacttacgcaagtatatgccaccatcaactacaccatgaagctgtgtgtagtctgcaagcaaatattgcataggtgttggaaaaataaaagagcaacttacttccacctcttatgccgctgttaggcttccgctcctcaacatatatctgccgcccatttatttcaattggtgaagcctgaaaattggcaaaagatttagcatatgacctgtcaaaccatgattactaattcaagcgaaggatgaccatatagtgcattaaaaaaggggaaagcagaccaccaattaaacatcacagtaattagtaaatggtgaagtgaatatgcattaaatttgattttaaaggagtatgcacacacaaattggagaaggtatttaatgcatgtaaaaaaaagtgagttttgttgaacagtttgccaccttcaatgcattgtgaacaccactaagttcttcgaattccacgaacgcatagtagcctccggtctcctgccaatgtcatacaaacactaagtcaaaagaaaattctatcatatcacgtaataaaaaatacatataaggaaccaccttgcggcttctgatagcaacaccatcaggaatgagccgcccaaacttcttgaactcattctcaagatcagcctcagatacagaagatggcacgttcccaacatagacagatttgctctctatttttacgaacagaaatattaaaagtcagtgggtaatgtgcaactcaaatcagtgaaagggattatgatgctagctcaaactaaaggacaaccttcatcatcctggacagcaaattcaccataaacatcggtttttggcttctcggttgccacagacgaagtcataaccgaatgctgtgcagcctggtttgtctcggttgcctggtgaggtctagtcggggctggctgggctacagggaacaccagtggagcttttgcggttcttagctgcatgagttataccatcaaggttttaaatatgcatgagatgacatcacaaaaagaaaaataatcatgatcaaccaagtgaaggtgcaacatacaatggaggcataggtcttctttactggttcaccaacaggttcctctacatgaggaggtggaacaggtggagattgcactggctcctccggtgccatcgccattccatttgtaaaggaagaaattggttcttcaggaagaggctcatctccccaattgtctgactgagaaactacttgctgtggtggctcagagtaagtatagttctcaacagcatcactttcttcagatgttattgggacagcactttgattttcctcttcgtgaatgtactctggaacttgaggtagaaaatatatagttagtaactacataattgcaaaaattagaaaagcagcagcaataggcctattcatacgtgcaaggtattgacttttattttccatggcaacattacaatttgaaaccatcagtaatcaacgcatacggaacatactttttgttggtgctcatagacagccaacacagaaggcatgctagaagatataacatagttcagaacatacgaataacatggcacaacagtttagatagatcattgacagagaataagaaatatggatcgcaaataggaaaaagaaataagaaatatggctgaacagttaaaaagaaaattgcaggaaattatgaagctacaaagatatattataccaggttcgacgacggagttggatgccatgttggtctcgaagttgtcctgggcaataacaggtgcaggttgcacttgctcttcgtcaacgaaatggaaataatcattgagaacaaagtaacccttttcctggggagcaaggaaaaacatctggatgaatttcctttggtggctgtactccttggtctgtacaagaccagataccataactagcacaccatcaccccatgagttgagaaagttggctgttttgatctcgatttgggtgaaattcaaggacataatgagggagtgtatatcctgcaacagttagcacgcatgcacgcaagcattagaagaaggctatgtagagtaaatgcacatgacaggtcgacaaggaaggaaagacaacatcagatatatatgtacaattcaagtcagtaagtcagtcaagcaaaggtggtgtgcataaagctacgaattcgaagatgctatgctagataaaacatagtacaagttagaactagtagtgcatagtaatactagtgcatagcaaaggtggattccattgcaaagaaaaaggatatatactatatattataatgaaaagagattgcggagaggagaggaggggtaagtaaccatcatggtgctggcggtggtgttggttccagcgaggtcgtcgacgcggaccatggtgctggcgtcgttgtagaactggtggacgacatcggggctctgctgcaggaggttgtagtagttgcgaaggaagtaggtgccgacctagagaggagagggggtgagcgaacgagcgagcgagcgagctagggtttggtttattttgaggagagaagcactcacctgagtcgccgccgccgccgctgcggaagccatggtgcaggaaaccctagatctgcgtccgcgggaagggagccggggaggggagggcgagatctactggagaaggagccgatcgagacgatcacgagcacgcccgctggtcggggccccctccgtccgccggtggcctcctctcgccggcgacggcggcggtggcggcggcgctcggagacgacaacgcaacggcggcggcggcggcggaggaggcggacacggcggtgcgaggggaaggcggaggcggcaacgcgaggcggcggcgcgaggggggaggcggaggcggaggcggcggcgcgagagggagaggggggaggagatgcgggtggcggcggctaagggtttgggaggggaggaggaggggtctggattagtgggcgtcgttttgcgagaaatccccttcggcttccacattttagagatctattctaattcgtgattttctcttcttcgcatggaatacccgggttttgtaagggtttttatgtaaaataatgcctcagaggaactgtttgtgaggatctatatagaattacgcacaaaacgggggctttatggcaatattgcaagttcgcgcgtatcccacgtggacaccgcgaggagcggcctgtgggctgtgtgtttgcctttgagagggaattaatctctggcccgtttggcacagctccagctcccaactccaacttacctagagccagagctgtgtcaaacggttcagatcatttattttttggagcggagttggcatagttactctacaaatttgtactacgggggtagagctgggtttttgctgctccacagctccactccactttaaaagacacactaccctttaaaattttagtgtatttacatgaaaatgccactgaactacctccaccaacctccccctcccgttctctctccttctccgtctccctcccgagccctaacagatgcagtaggcggcatcggcgtcggcgtcgggctgcggcgttggcggcggcgccgtcgatggcggcggcaggctgcggcgtcgttggcaggcggcggcgtcgtcgtcggcggcgacggcaggcgccacggcggcggtgcgcggcaagcacgcgggaggaagatgggcggcgcgcggccggcggagggcagagggcgcaggggatggggcggccggcggctgggatttttgtttttatttttttttattttttttctttttttaaatctgaagctgaaatgtagccaaacacttttgatgggtgtccaactccaactagagttagctcccactgtagtaggagtttggagttaggagttgtagtttggagcactaccaaacggagcctattttagcgaagtgttagcgtttgattttcatggatcgtcgccgtgatgctcgggtgctaccgggaggtgaatccggccactattatagtacttaattgaagtcatcgaactcgttgccgtcaaaaactaatctattatttaaaccgattatttatccctcgtctgatgagtaacctgctctgtcacgtgtatcatagctctgctcggccttgtttggatccaatgaaaactcccagcttctcatgggaaatgggccggaatcccggtatgttagttaaggcctcatggaagacagtatgggatcatacactgacactggccagcagggtttacaaatagcaatctcgattctccggaaataaaaaaacacaatctaagattggccagtgaaagacgagccctgttagattgtaataattggctataactctttaagcaaaggccggaatgtttttccattatctaaaaagaaagacgagccctgtgaaacattcgattttttttcgcaaatttcaaacaatatacatgttaaacaaatttcgacacattatgaaatttgaataagacgcacattttcaagatgatcgaaattcgttaaagatgatgaacctgttggccaagatatattgagatggtgttagagatgtaatcctgctataatatgtgaaataaacagttttaaaaactcggtctagccatatacccctccatcctaaattacagggtgtcccttttttttaaagaaaacttaaactcggtagcttttgattaatgactatactaaccatacatttttttttgcggggaaaagggaagtattactcaggaataatatcgtcaattacaagctttgagataaaggtgcaatcattttcacaccaaaatcccgacaagttttcactgcgacttttattagctaacatatgactaactaaaatttggcttctatgaaccttcctgagcaaacactcccgacttccagcgaggagatccttaatctctctaacggcaaaggcaagctccgagcgctcaacttctttggcttggatcatttgtaacgctaccaagcagtccgtttccacctgtactgggagcagcgtccactgaagcgccaaggcaataccctctctgcacgcgaccaactctgcttctaatgcactatgacagctgttcagggttttgcaggaagcaaaaatcaccctcccctcccagtccctcatgactatgccaatgccccccttctctgacagggcatcaaaagagccatctatattaaccttcaaccatccggtttgcggtctcacccatttttgtttgcaagctggtcttgatcctggagggacctctttcccataagccaagacagattagaacgttttttcctttctctgaaccaactacagacttttgtcggatgttgaacagtgactgaatatagctctcaaggaatcttttagaagactcgatcgttggaggggttttctcatggacgatttcattacgaacaaaccaatttcgccataacaccaagagaagggccgcccgttcagattcggatagcctgtctaacagatcaaacagccaggctttattatccatacgcacatcagtgagcacaggaaagtgcccatcaccttgcatagccatcagcaaaaatcttgactgggaacagcgaagaagagcatgctgggtgtcttcagtttctgacccacataccccacaggtagctatccgctcaagcttccttttcgttttattagccattgttgcaagggagtcagtggcaaccttccaagcaaaacttctcactttctgagggacttcacacttccagatcaggtcccatctacgatcgcctgccatattcgacggacctgtatcctcttgattcttcaaattcagagccaagtaataagcactcctgactgagaatctaccatgcaagtctggatgccaagctataaaatcttcgtcctcccaatttgaaatacatatgctaagtagtatgcatgttatattattagatttatattttaaagtactttcatgtgacgctaatttcatattcgttaggaaaacataacattaaagaattactgatcaaaataatttgggacggaagaagtagtagtgcacacttttttttctcaaacttaatttacagctaagctgcttagaaacaacaacaagaagaagaacaaaaaatcaatgacgaatcacattatatcatccagagaacacatctagttatacactgacgacgaggaataactaatgcactactcagcaagcaataatttatcaaggctacatggaagcatcggcaaggtccttcctgtacggagccggctggtcctcgtcggcggcggaggcgtccaccaccggcgtcccgccggcctccacctgcgcctgcgcccgctccggcaccggcacgtacgtcgccaccgtgtccttcctgaacgtcaggtagacgacggcgaccaggtaggcggccatgagcgcgaacaccaccacggagatgaggccattggcatacttggggaggttgttgtggacgagccagtccacgtatgtccacactaggaagtaggtgttgacgacgatgagcgcgaagctcaggatccacgcgatcaccaccgtctgcaaaaattattggatcatttgccaatttatgtatctagcatggcgaattaatcggttttcgtgtttgtgtttgtgtgggtgggtgaatgtgaatgttttttggttggagaaatggtttaaggaagcttacatagatggattccttgaggggtccaactttcttgctgctgttgcagaacttgagtagagggatgagagcgaacggcagctcaaatgacaggatcatctgtatccaaatcaagaattcaggatattgttgcttttggaggagcaaagcgaattcctacagaatgttcaattggaaaaataaagctgaaaacaggttgatgagtcttactgatgacaggatgattagcttgccggcgcctgagggaccactgacaatggagacgatgaggctaggagctatggcgatgactcgggtgatgaggttccttacccaattcttcatcttcatgtccagaaacccctggataattatcataacaaaagttggctatatttactgaaatagataatactcaagagtggacaaatgatatgcaaggtatcaaatagtttgtacaaacttgataacacctcgatcaatagtgtaaacttgacaaaccctgctccaggtttactatcaagggtgagcactacggaactgaattacctgcatgatgacctgcccagcgaacgtgcaactgatagtggtgctttgcccagaagctagcagcgcaacagcatacaccaccgagcttgatctccccaaaacattctgaaagtaagagataatcaaaataaggcttgaattcagaatgtctgacatgatcctcagtgagctctggtctgtaatttcttccatattacagaacaagatgtctataagatgcttctgaaagtactatcttttatccaggaaatgaacattcgaacagttcttaccctgagtaaaagaggtgtggattgcagagttaggtcaccacacgtgttggcatcagctggagaaagattattcgcattgcaaatggatccagcaacaacaacgactgaaacatttatgaggaaagccacgatgaatgcaagactacactcaataaggaagtatctgcaagcagcctatcggaaacaagatagggtcaaaccattagccactcaacaacaaaccatagctgatcattacatcatctattatcaatgcaacctactctgatgcttttgtctgatcgtggggtcttccttgacaggaccagagcagagtgcaagaacaagttgtatctgcatgcatgttatgaaaactcctcatctcatgaacttgtaccatggatcaagtaaaaagtagctacgatcaccaaagccctgataactgattgggtttcttacggtgtgatgatagcgccaaagagtgcgatcgcattggcagcagcgcctttcccttggagagaagggacaaacatgcccttgaccacctctcctgcagacggcctcaaatagcttagctctccgaagaagcaagctgccatagtgaacatgaatgctgctatgatgaactccagcttccgagcctggtggacatgtcatatggtaaggtcaattcgtcagtagcccattctcagtgtaattcatctgacaatcatataagtctgagaaattctttgcgcaccccaaatctctgtactccaagaagcaagagggtgctgaacactgtgagaataactccagcccacactggaatcttaagcaatatgttgaacgcaaaagctgtgcccaacactgcactaacaaaagaacgtgttactcatgctaaatctagcacagaaataaataaataaataaataaataaataaataaataaataaaacatcgatcaaccttcaggaatgtcatcagaaatcaccgccaactccgcaatgatccataagaaaatgttgacatagtgcgggtactcttccctgcacagttcagcaaggtgccttcctgtacagaactcaacaaaagcatggacaacataagatgataaggtgatgatgcatgattagcatgcaaagagcaaggttaatggttaagtgaaatatacctgttttcactccaaggttggcagctaatgtttggatcagaagtgcaaagaccatcccaactaagatgacccacagaagctgttcattgtaaaatgtaaattgatgttaccagaagaagcattttatataaagaggaggcaggaaaaacgaaatagttaattttgtttttctcctacttttctgtttcttgattgaatttgtcttctttaaatattaggaaagaaacaaattattgaccaccatttactaggcatgggagactttgtttgatttcgtgtactactgctactattatatcatatatataaggttcatgtcatgatagagtcatctcaagtcaatgattgatattccaacgttcttatatgtgtactccccaaaataatccaattttctttcttcaaataagacattgttgcttatgctagttaacggggagtccttttggtacagtccttaggatagacttaagtttaaactttgattatttaggcctttaaggaaacatatttcaatattctgtaaaggccacaccctcagtggaaggtttagaattcttcttgttcagctatgaaatcagtgcaagaaaatctcaaaatattatttatatttggaattttaaagatatttcaagtcaaaacatccaggaatacctctaaaatgtttaagagtctgttttgttcagatttgatgcccaaataagtgttttcctgacgcttatactaagtaggttctttgtaatagttaacaattttcaaaggccaaaccaggcaattttccaactaataaatggttccaagatagtctttcaatcatttattccaagattgggagcctttcaccaggtctttatttgattaaccttggttacattcaccctttccatgcgcaggcaaaaatctatgacacatggttaattagttcgtaaaagtagttcagatccaagacgaagaggcaagaactatgcagtgtacctcatacttgaagtcagctccagcttgcatgtcagtttccactgtcaaatcatgtttcagaaaaaagctataccacctcaacctcttctttttctttttttcttaatgagcgtatcaaaacaatatgaagctctaggcaaaagataggagcttacagttgctaggatctaggaagccaatggccaccagagctccaggcccaacatgagccaagaatttcctccatcttggctgttccacccagcaaaaagtaagcataggattgaaacaagcactagcttattgtggcattagaactccatgaatgcgcaaaatgtagtcgcttacctgcacccgaaactgcccatctttttcactgtcaatagtcttttctttgtactcatcagtctcactaacactctgcaccacacctccatggagagtttctcgtccaacctctctcatctcaccagtcccttccatattctatgttgctaatgcaccttgtctggaagatatgaaaaagtatgtcttgctctagttaagagccacatacatcctttgtattttatagacccagagaccagttgacgactgtcccatacagaaaccaaaacttcaagtacagtacaagagcagagtgactagctatcatgatggttcctgttgattcctcgcttattagatgcctttcagatctgctactcttgttgattgcagtaacaactgagtctgcaatattaaaatggaaattctaatcactttattttcagtattaaccacctcaatctagaatgtttaagctgctgaaaaatagcacttttagtcacatttcaacagcccccgccgcactataagttgtttagtccactgctacaactaaatgagatgcaaatatttttcatcggacaaataagtcatcacaaattctggtaaacttgggcaaacaaatgcccagtggcatgaggggcccaaggctaactgcagcataacacaatcacaattacaagctgactaccacgcataagaattcaaagctgcattacccaaacacctagacgtaaattcagcatgaccatcgatgttgtcatccgtcaaacctgaggatctacccaataggattttttaaattagaagggatttccttatctcccatacacagccacatgggtcgtatgggtcttcgctcctagatattttttggcccttatacaaagtttgatatgttcctttacagctaaacacctaggcttaggaaacaccaacgtctctacctaagatacaataaaatacatttgataaattgttaagaacattaatgccgccgatgtacctttgcttggctgttgctttccgattattttggagcctttcgggcagccatttttcggtgaaggcaaccttaagcagctcagacctggtgcagtccacatctctgtattctattgtagctattcagatgataagacttaaaaaataagcaacagatgaaaggacaataagcgtacagtcagattgtacttaaaaaacctcaaacctactctccattggaatccatattctactcaccaaattggaactagcagagaagagtgtgatgtgaccaccacctcatggaggatgaggtgcccctccatgcaccgaatggttagcttgctaacgagttgatacgcaggcgtgcgaaaatttatattgtcggccatggcttcatttggtcgaatgtggaagtcaagaactgtggatttatggcagtggacagaagaacaatgacgggaagtgggaactagacttgggaacggggaatttaaaatgctattaaaattttaaattaaaattgggaattgcattttaaaatttaaattgcaaatcgacttaggttttcagtagtactaaaatcccagaggcacaggacgatttggagtgactagcagtgatcaaattattggccacgaatcaaccagaaagctcataaacccctactacctaataatttcacaggacagtaaaacacacgagtagctcaccatcgccgagggagagaggcgcgggcggctcctcgccggggggctgcggcgacgacggggacgacgagcgcgaggcggacctcgacatggtcccccgcggcgcggcgctcgggaggggccgcggggtcgacgagcaccctcgggacggggaccctgtgggggacgggttccccggcgagcgagaaggagaggaggaggagcgagtcgtcgaggcggaggtcggcggcggagagctctgggcggaagaggtagaggcgtcgtcgccggcaacggcggccatttcggtcgcgaaggtccaggcggaggagtttgaagtcaggccgagctttaataagagaagcccagcccactctacataataaaagaagcccagcccactacctaatgaaacgagcccagccaataaaataaaagaagctcagcccactacataatgaaacgagcccagccaataaaataaaagaagcccagcccactctacataatgaagcgagcccagccaataaaataaaagaagcctagcccactaataataataattgtttaacaagcgtcagacgtgttggttacgtacgcggactcgtggagtactacacatatgtgtgcaggtgcagcacattgcgaccccgaccgcaacccaattaggcgcggccgcgatgaacgacgacgtggtggctgagatcctcttgcggttgccggcgaagagcgtcctccggtgccgcgccgtctgccggagctggcgccgcatcaccaccgccgactacttcgtcgccgcccactcccgccgccggccgctgcagctcctcggctacacggggcccaacgacgagtcgctgcgcgacgacgaattcttggtcacctccgccccggtcaccgccgtcccagccgtctacgacgggacgacacggagtgccggcgatttctgcggcgcaacgtgcgcctgtgcctccgtggatcctgcgacgggctcctgctgttcgagcaggtgaacgccgagaccatgctcatctgcaacccggcgacacggcagctcgtcaatctgccgccggtgagcactggcggcgtcgtcgtcgaccggaacgacctccggctccactcttccgccttctacttccaccggccgtccggcgagtaccgcgtgctgtgctaccggaagggcaccaactacatcctctccaccggctccggcgaggcgcggcggctcggccccgtccccgaccagcaacgcaggacttgctccttctccgccgtgaccgtcggcaagacggtcggcgagagcgtgtactgggaccgccgtgaggtcgacgatcggagccggataatggcgttcgacacggtgtcggagaggttccgggcggtcgcgccgccgccggtggagcatgccgacgaaggcccgctgctggacatgcatggacggcacgctcgccgtggcggcgatgccggcggagccgtacctggacgtgtgggccagagacggcggcggcggcgagaggtgggtgcggcgcctccgggtggagctgccggcgggatattattccaaggagttgaagcctcgggggcttggtagagctatcttggacgacgcgggtctactgcttgtcaccttgtcctgcagatggggcttggtgtacgacaccaaggagaagaggatgctcagctgctctcatcgtagcagaagcaatccgtggaatgcagcttaccgggagagcctcatcacggtgaaaccttgcacacccccgctcccgctaaactctgagccatggttaaatttctactagtggttgcagtgatatgagtagcgccccaatatctcaagttcaaatttttataggagcgaatttcagattggattatttaagagctaagttcctaatttaaaaaggctgcatatatagttggatgtaaaggctagataaaaaaaccctactaacaaaaattactgtccacgagcatactgtcgacacatcggtgacggagccgccggtgaggaagtcggcgtcgggggaggagagtacgcaggggcctctccggtgagatgccaacgtctccatggcggataccaccttgctcgtgtcgtgactcatgagggttttgtttttgttttttttccttttttgttctttttttttttaccgtggggttttgggggctaaagaagaagatggttacgtgtatgtacagctgggtccagttctaaaaaaaatacagctgggtccccgggtccaccggcagtgaaacaattccggtggaccaagtctatggcaaagctagccgtgtggcatagggcccacgaattagtagctgggttcacgtggaccagcaacagtaacccaactagagttatatctcttgaacagaggcacaagcgagaaaattgcacatctaccattccataagaatggcttcgctagaataccattatgaaaatgggcttcgctagaataccatcctcaatcagagtgtcttcgccaaaatgccatcctggacggaaatgcccctggctcttctttttcctccatcccgtgcgtgaagagctcgccggcgaccatggccagctccaccgccgcgccaccgatgctgccttgccgactgcgattggggtgttgctctccctgccatccccgccagtgccgacggcgggcgcgggctccagcggagggctgcacggtggcggcaggtgcgatcgacggcggcaagcgcgggctccggtggagggctggtcgatggcggcaggcgcggttgacggcagcgggcgtgggctccagcggagggctgcgcggtggcgacgaggaggcggcggccaggagcggcgccaccggctccccgtgcatgcgcgtcagccggatcctcgccgtcgctgccggagtccttccgtgatgacctcagctgcacgagcacaccactctaccgtcggcaaggcggcatcggtggcacggaggtgtagctggccatggtcgctggcgagctcttcacgcgtgggatggaggaagaagaagagccaggggcattttcatccaggatggcattttggcaaagacactctggttgaggatggtattccaacgaagcctgttttcataatagtattctagcgaagccattcttatgggatggtagatatgcaattttctcggcacaagttgaataacctaacctaaggctattgcttctgtagaggttagaacatttcatcacacttttctaaacctctatgatcaagcagaaccataatcccagaaggaagatgcccccaacttaaaaccaagagaatatgaaaatgcaaggcacgtttgaggtaatttgcacagatcatatgaacataatcagttgcatcgaggcacatgaatccgttgcatacagatgtaagaagaaactgacaacttatacagtatgccaacagacacccattccaaacttatgcaaagacaagagacgtgcaaatcgattcgtcatgaatcatgattcttacataggtaaaaaaaatggaatgcgatggtttcactgctactaaatgctaagtactgtgtgaagtagattgccagatggttgaaccacctaccaccggaaatatactgaaccgaattcactggtagctgggtctaccgttactccattttgatgtcacactgtcttttgacagcagaagataagctcaatgtcttgcagtttatcgagatggtcaatgtgttcactgaaagaacaataaactgtgcatggaaaggtattaggacattgggacatgatcacatgatctaagtttatcaaattttcaagtcaatgctctggagacgagaggaacattctctagagagaaaagcaacaaagtggaactttatccctacctgagcttaggcttccaataaattcatctatttggtgcctcatcatgtacaactcttcagccctacatttggatgatcactcctctattatcctgcgtgctgggaaaagcagaagttcaaaatggtggcagaataagagtaaataaacaatgtatactcatttgcacacaacagacttgcccaagtgcaacagttgccaatgaagctggccaaaattgatatcgaactatgatttagacaaagtatgacactgtgcaaataatcgaatgtactaacgttgggtttccccagaggcggcgcagatgaaggtcccaatctagcacaaatcaatgggatgtgcagctgtgcacaacattcatcatcaactgtcgcttcagttcacatcgaatccctatacaaaaataagcaagaacgattagttcagcattcagaaaaacttacattaagttgtatgaatcaagctgtattgcatatatattgttgcaaacatagtttcgaacgtctcagaatagtatagagctttaaaatcagatcaattgcatttgggcccaaaccagtaaaacttacctatgtatagcttaacacccattcacagggaatctgaaagtttagaatagagtattaaaaaccccacaatataactgaacgttgttgttttaatggcaaaagaaaacagggattgctctagtttcaaaagctgcaattcattgtagtacaccgacatctgaatgcccagtttaaaggtagatttgttttttcttatgctggattgtatgaattcgacataatttatataaagaattatcattcatttgccaatcataactattatactgttagtccaaactccaaagaagagtaaatataacagcacaatgcactgaacatgtgagatgttgagcgcaacaatagtgtggcaaacacatgctgctcatgtacttaattgcaaaacttaccagatatagggttagatcctttgacatgtctttcttgacataattgctttaatcataactctttctgaaaggtagcctaaaatagcaacactgcacagcaaaacaaaaaaaaaacctattatatgcaaaaatctactatatagtagtgctgtcatgtaacgatgatcttaaagtgccaacatacatgatatttagtgggttgtagaacaaaagaagtgcttggacagtatgaacctcagacaggtaatctagcgcatgtgttaacatatcagtggatctttcgatgaatagagagtacaacattcaaccaaagagtggttatgagttatcaatgaagatgaaatgaaatttgttgccttattatactcacctttcatatgttgcgatctacttatatgttaaccatccatattgaagcttacaacatatgtgctttcaagttgtattagctagttacaagcaagttctaaaacttattatcattcataagcttctactgtctgcatgtaatctagggtaaagagaaacttactcagccagtgttttctagtacataaatgtcatcattctgctgctgcttattctcataaacgttgcctctttgaccccatcctgtcttcactctcttggtgattttcatgactgtgcgagcactgtcatctctgttgaatcagcaacaaaatcaatccgttgcagctcaagttcgacacacaaaggtagaaagtgcagacctatttttctagacaggataaatttcatttctaggttctgagtacatatgctttatatactaaatcagttataatgctttgttgctagtctaaccaatgcaaaaacttgcacaagaaaatagactaaagaaaatgtcacaaacacatcagaactaaatttgtcatcacaatacctgtgcaaaagagcatgccaatcactttcagcatgcttgtcctgtccatgcttctgacttctaggcttaaattcgccagaaggagctgcaagaccattatcacgctctgccatttccatcattttttgtgagagcatatcaacatgttgcttctttcccctttcactcaatgcatcaatcactggcatgaatgctgctggatcaaatgaatatcctttaaccattaacagcttgagtaacctatgtccatgatccacctcatcaactttgcagagtccctcaataatctgcttatatgggaatctatggatagagatccttaattcaagcactgtttctagaatattcatggcttccaaccatctaccataagtagataactgggtgcacattaaactatagagcacttccttctgaccacatgtactcagagaagcatcaaatactctctgagctgcagagaaatctgaagttttgcagaaagccttaatcaacaactcaaaagaagttatattaggaacaatttcattctgtaacatttcatctaaaagaggcatggccttgttcaccattccccgttcacaaaatgactttatcaggctattataggtcatgacattgggacaaatccccttccccttcatttcactaatcaatttaaggatttcatctgaattgtgtttttcccgaaatccccatatcaacaagttgtatgtccttgtgcttggcttgcaacctttcttttccatgtccctcaggaccttaacagccagagaagtcttcccatgcttgcaatacccatgaataaaggtatcatatagaaccgaatcaggagagatatctttgcctatcatctcaagcaatttcttctttgcttcatcaaacctgccctctttgcacaatgcactcaccagtgtagaataagtgattcggtcaggaagacatcttttgctgctggaagaatcagtaagtaaacttaggaatgaataacctaatctgccaagagccaaactaccttcgttccacatgccatcgacaatgtccatggccatatccaatttgttgtttctacatagtccatcaataatgatattgcagcttgctgtatccaagctgtatcctttctcactcatcctctctaacaatcgttctgcctctgtaatcctaccagctttccacaaactttgcagcagaacattgtaagtaaatgaattcggggcacaccccttctgtgccatctcatcaagaatcctattggctgcagcagcatttccctctgagcaataagcgtggagcaaactagtataggtcacaacatctggtgtcatgacaccactcttcacaaaatcctccactttcctcacatcaaacgctttgccctccttgcacaacccatccacaataatattgtaggtgtagctattaggttgaacaccctcatgcgccatctccctcagcagctcctgtgcttccccaaccattccattcctcaccagccctgacaaccaacggttgtaactctcaacccgcctcaagaaaccaccgcacctcataatatccaccaggactcttgcttcatccaccataccagcctcacagaacccactcagcatcacgtcaaacgtcacctggtcaggcctcggcagacctctctcccatttttcctgcatgtcgttgaatatcctgtatgcatctagcacccgcccagctttgcagagtgcagagatcctcgcattgaatgtgaccacatttggagcaagaccctcatctctcatgcgctcaactagcctctcagcctcatccacctggccctcgcggcagaaccccgcgactactgtgttgcataccaccaaattcatcgttggcattgaatcgagcaccccaagcgcgtccatactcctccccgcacggcagtacccacgcgccaggatcccgaagctgaactcgttcctttccggcattgcgtcgaacaccctgcgggcgagctccatccggccagcggcacagagcgcctggagcaggatgttgcgcgtgaagacgtccggggcggcgccggacaagaggagatccttgtagagcgactcgacgaggtcgaatcgggcctcctggagcgcggcgaggagcaggcggttgtagacgggggtgggcggcggcggcgcggaggggagcgcgcagagggagcggaacgcggagagggagaacccgagcgggaggcgcagcggcgacgatgaggaggagaggagcgcgaggaggtgcggcgcggggtccgggagggagaggaggtggcggaggaggctcgggaggagggcggcgtcgtgggcggcggcggcggcgaggatgcgggcgaggaatgaggtggagtgcggcgacggcggggacgcggcggaggtgaggtggaggaagaggcggagcgcgacggcgggggaggcggcgttgcggcggaggagggcgaggaggtggttggcggcggtgggggaggtggacatgggaaggtggcggccgcggggcgacggcggcggagagggtttaaaccggcccgggccgactggccggtggggtacacgtctggtcaacggcccagtccactgacactgactggtgggcccggccatgttacattttttatgttacattttttgtgtccgtatttccacttgctgcttagagcagatactacagatttgtagccagctatagcacggactccaagacacaatgtgtgtatgataagtgggactagatgttaatagtgtagtacgtaactattgtatgaattggctattaagttgactatagatgatttatagctagtagttggctatactattaaacttgctcttggtatactccgtacctttttttttctgaaatttgcgcttaattagttcggtgttctgggttcctaaccctgcctcgttttccgaacacacgtttttaaactattaaacggtgtgcttttttaaacaaatctataaaaagttgcttaaaataatcaaattaatatattttttaaaaaaaaatagctaatacttaattaatcacagactattttagttcaagcttactccactccaaacattttgaaacagggtgaatatacaggaataaatttgttatttcacgcggctgtgaaattgtaagttggaaacagcagacgttacagagtatttcacgttacatgaagcagtgcagcacaaaccactgcagatttactcaacatgagatcattgccaggctatagataaagagagaaaaaaaaacataacctaacacacaacgctgactgaggtaaagatcagtaaaatgaaaaagaaaagaaaaaagaagaagcaagaaactaattccagttgtgagaagagatcagaagcaagaaacattctcggttctcatgaccaggttgcaagtcgagtagatggaagcggcagcagcttgcactgcccactcgctctcaggagtctccgagttcttcagtttcctgaaagacatcgtagtagtagtatttcagtaagatatatcacgcataaagtgaaatgacttggaaactactccctccgtcctaaaatataagcatttttagctatgaatctggacagattcatagctaaaaatacttatattttgggacggagggagtaagacatttagttgctatatatttgagtactttgttcaactaagtctcatctaacagaaaagggtggatcgaatcgaatacgttgagaggtgatgatgagctaaccataattcagccattggtcctactaatggagcctcgcaagccatgtatctgagccctttctcacaattcatttgcatttcttgcacttccttcaaccgattctcctgcaacagtaatttagcacggtgtcagtagtggaacactgcttaccagaatggatgtgcaattgcgcatgcacatatgcttttgtcataaaaggcgatattgcgagaatatgctagttttgtgcacctataatgaacactattatgaaaaaaactcaccagatgcatcccctcctcctgaagtgttctgtccatctgaagaaaaagagaccgccatcgtgccacatgcgcttctggaactgtttttccagtagatccaccatcagaagaatgtacaacggatggttcgttctcttggttatatgaaaattctgttgatattaggtagggcagttcagtctgaagggcattcctgactctcttcttgctgcgcttcaaagcttcaagaataaagaaagcatattaagcagaatgtatgggttacagctttgaattatgtttcaaactcaagaattagtaccagcaaggcgccctctgatgtcctgctgtagtagctccaaccactgagaagcaacattggccgctgatcatcaaaaaggcaaggcaactgtcaggtatagataattctacaaacagtgaacaatgcagttctggtgagagtgtatgattgacgaaataagagatcaagtataccttttactgataacacagtcatgtaatcatgattagatgcaaaatcatcggctgatgtactgcaggtcctgtctgaagccatagtgactgctgatgagagttgcagtttcagatcatcaccgtcctctggaaggaattgtgaagcagtaggcaacccttggtgaaacggcatgttgctacctttcatcaagaagtggcaattcatcatattacccccatatctctggtcctgagccttctcactaaattctctccctctttcgcctgtttgactagcatgaactgcctggttctctttctcaagattctcagagtgcaccatagcctttattatggagtaaacttgcttgctgtttctcacatggttaatgattccagggtttagcccagataataggccactcggagcagcaaccttcatgaacttgtttgtctgttccttctgagcaaaagtgttccttttggattcatcgtctcttttccttttgatgggtcgaccgcgcggcctaggacccactgcagttccttgagatgaagaaaggaacccattctgcttcatttctctccacttcctgtgtgactcactctctcctacagccccagttgtgctaccacactctgacggatcactaactttcgtctgccccaacttcttgtaaggaaagaagggattaagttctgcagcattggaagaatctactatattaagatccaatccaagaggtgcaccattcattctgttctctacatgtcttacatcaggcttaggttgcaagtctgtcctgatgttttctttatcacacaaattgttcacctctgctgcatcagaagaacggcccaaggtgaggcaggcagcctctggctgaagaaatgaaccagtctcaagcaatgagggctctccatcttcacttcttgttgcaacttcagcagtaacttgaggtgtatctttcttgtcacatggatgtagacaagattttgctcgatctgacgaatctgaaatccccactctcatatctacatgatatagaataattagtaagcattagcagtgcaaagattaagggaagtaaccagtaacacggtcaattaggataaatcatgccttggacagtgtacagtacataataggaattcagtggtgtgaattgaggctaaggatgtgtacagtacataataggaatcaggaatgcatgggtttatagccgtgtttttaaaaaaaagtgtacaaggccctgtacaaggatgcatacaaggaacgagtgacccaaccttgtaccgcttaagccgcataagttctacaaggtggggtgaccgcacgaaaccacataccgcttttcaaaacattggtttatggcaatagaaaagagtaacactcacgaattattaactttgcatggcacagaaatcaattgtcaacagcagtttcatcctgaatttatcatttgcacattctacacatccaggagtaatcttatgttggtagcggtacagaaatatgctgagtttgttatgtcaattcgctcctcaacagaagcaaacaagaattcttaattacagctacaagaaaggctaatcgaaaattcgatctactcatacgcttagatctgtagagaagcaccataatctaccgtcacatgtcgaaattctgtgctgccagcgaatgaagtactactgcatacaaagagttcaagaacaactaccacccaagaaagtaaaaaactagcatttccagatcacccccgcgccaagaatcatccaaccagcacagatcaggaaccaagacggcaagaaaagaaaatcaagaagcgccgagaaccccccacctcccaatccgaccgccgcccgcgacccgcacgacgcctccgcagccaccgcccgacccaattcctgcaagaacacacaccacaacgtcaaatccaggctccccaaatccaaaaccaagaaccaacgacaccaacatccaagaccaccccccccccaccccaccttcgtggtcgtcgtcggcggcggcggcggggacgacgcgcccgatccggcgggatccgaggccacacgcagccccgcggggtccatccgggaggccgcggcggcgcgcccgcgaagggggagggatcttggagctagggtttgggggggggggagcggggcggagggaagctttgcgtggatttgaaatggagacgggtgcggaggcgtgctgtgtggggtggggtggggtttttatggtgtgcgggttttttttgaattcgagcggaggtgggcgcggtttggatggggatggatggatggataatgagacagatggacggacggatgggtggatggatcgctagcctttaatcgcaggagcggccttgcggttgcggatgataggaggggagcccgcggatttattttcttcttctttttttcccaccttggtggtttgaaggtgattggtttgaattttggttgtatacacagctgtgggtttgaattttgaatggtgggctactgaccttgtgtgacatatggtgaacacgcttcaattctcttgatggagtaacgaggggaggaacatcaaaaggacaaaaggaacacaagccatgctataggctatagaaactagtactagacaagatgataaacattgcttgagaatgttctaacagggcacttgagacgtattttgtgtgtacatgttctttagtgtgcacctccaaagtcacatgccacatatatggttgtatgtctaacataaacgcaaaaagttgcacaagagtgcataccgtctaacaagatcatttgtgggatggaagaagtatatttttataattttgcttatgagcattgctacatatgcaagcctcaacacgagagaattcattatatggccctaggtttatcacatgtctacaatttaccactgacttgtcacgttgtacattatgctatcgacttttgcttaacttttacgatttaccatcgctatctggttagcctctgttagtattatacaatcttatccaaatgaccaaaatacccctaggataaaaactttcaaaatttgaacaaaatttttgaaatatcatattttaagtttttgccaaattttggatgtttacaatatgatattttggaaaaaaatccaaattttggaagtttttgtccttgtggtattttggtcatttagacaaaattgtataacggaggctaaccggacaacgatggtaaatcgtagaagttaagcaaaagtcgatggcatattgtagaatgtaacaaagtcagtggtaaatcgtagacttacgacaaactcaatttttttttgcggggacttacgacaaactcaatggcatatatataatagattctctctctctacaaaactcttataaacaataaccttagctgtttgatttaagtagataaaagctatagacaatctagatgtactcacgagtcacgacgtaagatgtagtgtttgtaagagtttggtatgacacaatttaggccctctttgtttaggcttaggcttattggcctagacttttaagtcagcttattggcttatatgatttataagccggtggatttaatgtcctaagtttagtagttgagtcatacatctacctcacataagccaaaaaagcttctccaacctagcttttggcttaatagtgttagagtggcttatggctttaaaaaggccaaacagaaaagctgcttgtttgtttaggcttagacttttcgacttataagttggtttataagcctaaacaaagagggccttaatatgtatagacttttcctttgcggattgacaaggtattagtccatactctcatatacaccccatattaaaacattataactcaggcaaataggatagagaccactaccaaaagtaaaattttacatcctaaaatatgattctttccgtctcatttgataccaacccttcactgaggatttatttagcaaatgggttataagaggtgagatcgggataggaaataagtgaaggaacaagaaaataaaccaactgactattttgttgtattataactatggctcgttgtatctccactagctccgactcatctagacggtcgttgttggatgaaggtctccatcttacgttatcatgactgaacttaagcattcatcgacttgtatgcagggttttacggtgccaatgcacacttgaggtaacacaaagtgccatgtgtcgatcagattgtaagttatgaataattttttcgtcacaagtgcggcgatatttggtaccaaacaaaatgtatggcatataatagttatagtaatcactttggctaacaaactgcggcaattctaagatttgatgtgacaatctttgctacaatccgaacaagcctaatattttacaaagataatccatcgcatagctagatcacaaggaaaaaaggctatcacgtgaacatgttccaacctagttctggcaacagttagagcacatttggtttttcagttcgcattacgcatcactcttccgcgccattccatccaacatttttatgagatacatgggcctcatggcccaaataggtgttgtgttttttctctttattctcaaacttgcttttctgttttcaaatacatatgtataaatttccatgcaatagttctatgtagaatatttctatgctaaaagtttctatgtgtaggtcctaattggttacacatattctctaataagtcaaaacgacttattagaaaataaaaattaatttataggtaaaattttttatatatgtattctttgcgacttaaagctaatgttaaaaaaactacgttgaaaatatcttaaaatcaaattcaaaattaaatttgaaaatataaattttggctttagctttggcttattaggacaatcaatggggctcgtaaactttctagatcaacatacttttcaaaacgtgggggcctgatttcaaatgaatatatccaaaacgaggaaggaatgcctatttctatctcatcttcattctaagtttatctgacacgaaaaaggaccatagacacatatatagttgactcgcgcaacttcagttcacgcaaacacatgttgagaaggctattgggcgatcagtcgcgcgcatccctccccgtgcgactggacacgtgtcgcgcgtggggagggagcggcggacgcgccgcgcgagagtccgacttttccttttttttttccgtgttttccgtttctgtttgtttggcttttttttttccgtttctgttccgtttggtttttccttgttctttcggtttcccttctgttttttttcggttttttaatgtatgaataccaagttttgtattcgtacatatgcaaagtttatatacacgtatgcaaactttgtatacgtgatgcaatttcttgtttttattttttaatacgtatgtatataaagtttgtatacatcgtatacaaagtttatatatatcctatataaactttgtatacattgtatataaactttgtatatgtgtatatattttttatgcgttaaaaaatattcataaatatatacacacacgtatatacatatgtatatacatatgtatatgtagtatatacacaagtatagtagtagatacagagaagagactagaggggaggcgactgaccccgcgcgcatgggggcgcgtggcttatcgtgtatcattgtatcagcgccccccaacacatgttattaaacccaacccgacacaaaacgcatcgcgacaaaataattatgacatgaacagtactgaatatcaattgtattttataattttctacttactgttaatattaggattttgacaagataaatgtttttattcgttttaataaggcacaaaactgttttgagcacttgtttaatcgcgtttgaactttgacgtgttagttttatgttcccattccattccaccatgcggtccacgccccctcgattctctctgctttccgcgctgctgctgaccgacgacggccgcgcccctgtcccggtctcctcctcgtccctcctccccgcctctccactcttccagaacatcgccaccgccaccgccgccgccgccgccgctcgccggccacgaccgcccccggcccatctacacctccgccggatctcgcagccgcgctccccccattggagggagatccgttccagcgcgtgggtaagcagcagctgccttcaacggttcaacccaacctgcgtgatagataggtggtgggtggtgtgacgcggggggtgttgcaggtgatttggttcgagagcccgcgtcgcacgcaccgatcagtttggggggagggggggggggggggtggtggtgtgtgatttggttggagaggagagtatagccttgggaggggaatcggaattgggatgtggaatccccttggattggatgaggtgatttgatgatttggtaccaggatatactagctcgagcacatgtgctgttggaattggattcccacctattgggtttggttgctgctgggttgagggagagtagcgttaatcattggtccccgtgtagtattcactgcagcggtatcagttattgcccgttgatgctcgttgttgaattcttgaacatttcaaagttttttgatgcatccaattgctaatttctagattctactcaacccaatgctgttaacagagcccgtaaatcagaggaatgttgtaggacatgcaagtggtgcagaagtaacacatactcatttattaacgtatttttctacgaatcacatcaattttgcttaaaagttcgccaaagcactagcagaaagcagccctagtgacagcacatgatcctattaccatagcttttggagtataacttatcaccttccttcccctgattgctaactgaagaggagggtactaatatccatacttcaaaccatcaggacgaaaccaattctgcgcaacttagtaatgtggcttgtacctttcttttgcgcagaaagagaactttcattaatcattaatcaatacccaaaaggagtacattcagctactattgttaatacaagtggcttgtattttatacagagtataaactgctataccctttcagctataaattgttagttattgttaggtttgttggtccttttgcccctgcaggatttaatttcaacacatgactggtgaaatgtttgcttgatgatgtccggacatgatttcagtattgttcataatgcagttggcatctcatgccactcaagcagatgaagcaacagagcttgcttccagctgtgattgtgcagaagtgccagcttcacagcagatagtttctgaatcaagtacagcaggaagctccacagagcatctagtttcatgtgaaatcaagccactgggtgttgatgaagacattgaaactattgatgctaacgaagaaacccaccttgtcattcaagactgtccacaatgccggatttgccttgataatgaaggtccattctgtgacttgaagtatctttcttatggagtgccataaaggctttcgattttttttttgataatattcatatttttatgttgagtctacatttgatctgatattttttccatatccactacaagcaggtgatgacttgattgcaccttgtcattgcaagggcacacagaaatacgtgcatcgatcctgtcttgataactggagatcaacaaaggtggattcatgaacatttgctctttatgcttcatgtacctatatttactgccatcgcagaatccagttaatcattaacctaatccagctctgacctagtttctatgttacatttccaccaggaaggttttgccttttcacattgcactgagtgtcgggctgccttcttacttcgtgcaaatgttcctccagatcgatggtggttgagattgaagtttcaacttctggttgttagagatcacacgttgattttttttattgtacaactggtacgagttccacaccttctgtaatctaattcaacaaactgttttttctttactgaaccaatactgaatacatctcagtaggatttctccaactgtttaccctaaaaaatgaacatgctacaatactgaactcaagcatgacatggttgcaccttattctgttaatgtataaagcagtaatgattttatggatttatattgatatcaccatttctttgaagagatgtggtagttagttcactgacttcttactaatacattgccatgatttctggcgtgagatccaaaagataaacgtttttgaataaatgcacaagaaagaggcctgaaaatggtcacgatgtgctgctgtaagatgcatctttgtttttgtcttacaatcttatccgttttcctgcctgataggttgttgctttattgggtatgctagtatacagattttatggagatgaactacgagaaatgtttggttatgaagagcatccatatgctttttatgcaatggcaagtaagttactttttcatagtgatatctggaaatgtcatgaactgcatcttatctagaaagctcatagagaactgaaaaacttatcgttttcttgtgtagcatctgttcatgttgatccagttcatgacatgtactgtcaacatggcctggcatttatgtctctaaagaaagtcactccattctattacatctttcatttcatacttatagctaccatttaaaaatatggtgtggaaccaaagtacagtgcaatttatgtagaattgcttttatgtattgtgaagatcatcgcgcagtttataatggcagctatagctttgggcctttgagatgaaagataacatatactacacttaatgttgggcgtccatgattatctaagtgctctctatgtaaatggaatcacggaagatgcttttcagagggatttgtttccatggttcttttagaagactgcacgaattgtaacatagtcaaaacaaaagtctatgtggtcagagggaactaaaagcaactggcagattagatgagaacgccgatagcacatatctcctttgttggcatttaactcaatgcatgtgattgcacaggtcttgatgtacatatttttgccctgtgaatgttgtctgtgtacaggaataagaactatatcctctacttctacgttaaaaacttgttgacaaaataattaacgttttaaatgttacttaaattgcagtattggctattgttttggttggtttgctgtatggattcttcatagctataatatgtgggcagaggatcacagaacggcattaccatgttcttgcaaagcaagagttaaccaaggttggttaaagaacataaagatggaaacacaattttcattgactgatcttttcattttcaagaactacactgtgtcattgaaatattaatagtagtgccatcaactgttcaatctgtatatgcacaaaaacatgcagatttcttcatcttttttttttttacttattccaaccattacatgaccttataaggttgtgaacagactctctcatctctatttgcgaaaacaaggttggtttgttttagtgaaattaaataaataagttgtgggtgtattagtaataagggtgaaaagactgcctaatcaatgatttaatggtagaccatgatggccccagcagggaacacaaaatgaggtttcttatgacataatgtagattctttcttagctgacagtttttttatgatgcgaaaagtgttctatttacattcttcccttttccttatggccaggggtgtagccgagattcttccaagcctaggactagagcattgcctttgttatagctttttttgccatgtgggacctgagctctagttgccccacacatggttcccttcctgcctatggcatattatcttcttgtataccacataaagcttgtatttaaagttctattcacacctcacagtatttgatattcctctgatggcaggagtatattgtagaggatcttgaaggaactgatggagttcctgaccttgatcctaatcatgttacagagctgaggattctggggctatattgagtactggagatatcatcaattcatcaggtaggaaatttagcacttgtgctataaaatgtctgtttagatctttttatgtggttgctacttcctcagagatctctctttgcatcctacaaatgtagcagagctcttgattaacaatagccacttaaaatgataaaatgtggcatcaagcatctcacacatccatattttgccccagacatatgtttttggtcattttctacagttttgttttgtactaatgtgcaatgcatgtgatgccaaagtatttctggataatattttatgatcactgaggttttgctactgcgtatggtcagttgaatgccacaaatagttctttcactgtgataagatgaagaaacttgtacagaagagccccgttttttaatcttttttttttaacctaggagtgcttatagctgacttatatactagtgatccaagatgaatcattgtaactcagttagatcttccacattttctgaaaacagttggattcagtccttgagagttgataaaccatgcttgatgtggcttctgatgaacagattcagacacacctcaaaatcttagtttttttttgtttcatgggaacaacacttggctaattcaagttacaatacaaagatttcccaccacaagggacgtaccaacttgatttgaatatgccatgagccatgaagagtgcatacattttgatggagaagctgtagatatatatattcatagcttcaccttcctattgagatccaaaactaaagtaactgcattgcaataaccaaatccatcaattgttgttgtgctggcataaatcaggctaatttctgattaatcttttgtactatttgcaatgctattacttggcttaagaaagagcaaataaaaaatgtgattaaaagacctgatgagatgatgagaaaacgggaaaaaattataggagaagaaaaacaatgtagtcggaagaaaaaaaaaactggaaggagaacaagagtgtgtgaaacatttttgtcaagcagaaatgtttgctgaatggaggaacaattacatggaaggtctgtggatcagctattatctttggagtagtccctagtgccttatctaaggttatgccctctattatgagattgcctcgggaacaagtttttaagctcccataagggtcggctcctctgttcatgaaagacctgctgccctgccctgctaggctgcttgcgggcccagtttcaggatgtcaaggaagttggtgaactgatgataggaaagcaaaagccctgtaaactatggccatagccataacatccaaaggtaggtttatacttttgttcctttagccgaaccttatccatgtccttagtattattttgttactgccttgattttattctatcaagtttctgctgaaaattccaaagacggataaatcttcaatattcataccttgtcactgttccagtaacatgcgggcacccaacttggcccagcaacacctgataatttgcttgccttgttggactagcccagcatatccgctgcagtggtgctagaatgttctagctatgctcaatagagcaaaaccataccaacttgcgttaaccttttggatgaagaacataagcaccattggttagctggtgtgctgtagatatacattgcatgttacaatacacgaaaaacagatttcttggaaaataaatgtccttttcttacctaccgttgggagcaatgtcagagacaatctcttggaattacaaaactactccagcacataaagactttctttgaactcacaaatcaagagcttgtccttgagctatttcagcagcacattttaaaataaaatattttgtttccattgagttcttgtgctctaatttgtaaagctgaaacagtagaggaatcgatcactgatcagtttctattggagcagctataatttctgattggatagcttaggataaaataaataaatagaaggagtttcaggatgaatttgcaagcctgttctcatcagttatcttcccagaaccaaacattctgttcccattgcccgctacttaagcgaagaatatattctcctatgcatataaatttggtagtcttgcaggcatctttctgaaagtagcagaatatatgggtagagactagagagtactgttttttgttatattgacatccactaataaagcatttctctcttagcaaacattctcttggcatttttttttaatcttgattgcgtgttcttgatcttctgtaaattcgttttacttgctttcctttgtcagttttgcctgatacagtaataccatccttcatttttccccctttttcatgctatacattttagttttcttatctgttctcctctgcttttgtttacttcagtgagcaaaactgtcaataaacgaaccatcattctgctgtagtacttgcttcaaaagattgaatttgcatttatatgtggcaacacttgcatcacctatgactagtgtacattaaatttgggcaagtcaaggctgcacttgtctgtaaattttgtcaatgtgggttgccaagttctctatgcatgttagtgtctcttgacaatggcttgaatctgcttcccatttccccacttttcaattttatatcctggctttgtcactaccagcctagactacatgggttgtggagtggagatgatttgccaattgtgagcatgtttttgccgtatcttctccaggtcacctttagcttgtttctttgtttttcagaaacacgacaaatataacaagaacactattgattgaagaaaaagaatgttagtgccatttatcaaccagacaaatgtttgattagccactagtgattactaacggaagtgcttaacaatgaccgcaaacttttggatgattcaagatctaggtatcataagttcacaacatcatatcaggatcatgccttcattgatttatggaggaaatacgccttgggtgaattacctcctctggggaccagggttcaagacaaagactcttcccttctcttggggataaaaaagagctcgatagcttgaattgtcatcatatggccagtgggatcgatttgggagttcaaaaaacaattagaacataagaacaatataacacataaaaaagggacatgcacctgagtcccttatcactcgtaactattttcagctgtgctctgtcatggtcggtgcaatgattgtgtagagaaggccatttattgctcttgagacaccgtgttgatgcatctgaaccaacaattcatgatgacatactgtttctctgttatgcaactcaatatgctatcacccagacaattgtgcaaggttgggtgtagttggtgaagttactgaaaatgtgttgggtgatagaagtggtactttgagaatcagttcatgccatgtatgtttccatcagattcatctctagtagccctaaatgttcttaccatttaaattcttgctgaatcattaacatcaattgcaatgcctaaccgctgtgtttatttcatgtgtgttacactagaaaactgtatcacaacatgtaatcaaaaggaattttgcttttggaaaaatgactgtcaatagcaatattcttagcacattttgttaagttatatggtgaattttacttttctatatgtttttcagctaaatgtcgatgctaaaatggtcatatgggaaaagctctgtttagatacaaatccataaggctgatgctgcacggacatcatccagaacttcagcacaaggcatgacaaacgggcttatctgcgttttggaagacatgtttgtctgaaggcatccaatagagtttagagctatttcccttttttccccatgtaggataaattgctctcacacaaaaaggagaataaggtgagtcccctcagactctgaatcgatgatgaggattatgatagaaatgttaggatgccatttcgaatggacattttattagatattacttgtctcttcatgttcacaataaacatgaatagttataagaaaatgaggtaaatagagacgtatgcaagctttgcttttctgccttcataatttgcaatgcacatgctgggcatgtactggatgacctttttaattgtttctcccgtttctgattttctatggtttgctagtaccttgggacttgggatatgctgctgaaatgaagggcaagcatgtagggcagtactcctgccttgctgcctgcattttcacaaattcataatgtagcaaacacctctaagtggacagccgatcattaaggatccagtggaaccatctcatgtgcaaaagtggacatgattctgatggacacatgaactggattctgaaagttcttggcagcaaccctaacttttagcttgagcattgcacattattttgcccagaaagctcttcattttccttgggtgatcagacaagctcacaagcaacataaatttgactaaacagatggcaccaatccacccatccattattagtttctaatgttaggtcaactacacacttgcagctacaactgctgaacacaactttgacatacagttgcttaactttgttcctctttgatattgacagagatgatgttttctctaacatgaacacgtgcacagcaattaaaaatatcgccttctcgttttgcacaccaccttaagcaactttctcagctttgatcctgagtaattaagctaattaatgcaagtatgcaactatacaagattcaagcttttgttggaagttgaagacccactcactaatggtgggagtctaaagttaaactgcagcagcaagagcccagaagcaagcaaccatatgtacttaatctggcaagaatcactgcaatttgttctccatggcaatgcattgatgaccaactagttgctgaatgctactctgatggtgatgtatcatgattatgctgggtgacagttacagatggagacttcagcttctctatgccaaagtgtcccattggaactgtatctccttgattaattaggtggaggaactgagacttgatttgggtattagttaataaatgctcatcatccggggtttctgttgcataattaagacttaaccaccttgcaattacatatatatgatagtattattaaatgacaagcaactaaaccaataaaatgaaggtcaagattgatggctacatagggtgcttcagtctttgctcaactgggagtaggatcctaggttcacagtgtggtgaagctgtctcttttctagtcgtgcgatcataaactgaaggtcaagattgatcgctacagtaattcatcctgtcagatacttgtaacgagaaaacaatgacaacattttccctaaaaaaaagaaatcgatgacaagctctttctctctctctctctctccccctgagaaaacaatgcatagtaaaaaaacttccagtccaatatggacaacagatagaattgcagagcattattgcaaataatgtaatcatttaacaaatatatccatggatatgccatgaaatctgtaccataagaaaacaatgcatagtaaaaattccaatccaatatggacaacagataaaattgcagagcattattgcaaataatgtaatcatttaacaaatatatccatggatatggcatgaaatctgtaccataccgtatgttcttgaaatatatatcttgtttatgcggcaagaaacagaaacctgattggtttatggatcggatcaagatttttgcaccaagccaagaaggaatgtgatgctacatcaaaccttgatatctctctgtgcctccacaggatgacagtagctctgcactcctgaatttggaatggaaaacctcatgtcaaagaatttctggagagataattatgatatcatgttatatcatatcatataatctagtagcacccttttgaccaatgtgcctcttcagccacagcatcgagttgctcaaggtttctctcaacttgagatcaagaaaattgctttcaagcactattgtttaacagtgggattcaatttctctgacaatgacatgcaattccaatttgcttaataatatgaaaaaaaaagacagagatgtccaatggaatcagaggagaggtccatctgcagagctagtgttcatacttcatacgcttggatggatcaaccagccatttgaagcagtgattcagttaagctctcctcaccctaaaaaagagagaacagattaatggagaactccactaatatcatggtagagaagaactttaccatctagataattttgtgattcttaacttagatgagctagacaaggaatcctttgcttccttcttgtaatatttctaaaactgcaaaagggattgctaaaaggtcaggagcagaaagtctgtcaagtaaagtttaaaaaagtgcactcgatcatgcagtctgatggttttaatcctttcagagcaaggcaaatgcagctttaccacacaacactgcactaactgcaatgtcaaattgagccctaattggtgcatagctggtgcctctaagctagttggtctgtatgaactggccagtcaacatccataggtgcctggaagcttcagactctcagaaagttagtacaattgtgctaaattgaactgaattatacgcaaccatgcagtgggatttcccctctatccaggatttttatctttgtacaatttctgcaattcctgcacccaatcagtggccacaatctcattggctggcctccaaatggatgtgaagagcagtcactctccctgcctgctcttcagagtaagttgctactacaaccttcaccttccatgaatgcacattgcaaatctgcaagaacttcttatggcattgcaacagcctgcttttgaggccttggttctcccttgaactccacagacccctatccttcgcctcacacggtgatcatgacgggttctttcgtcgtgcatcccgccaataataccgcctttttgccttccattttgctcacatagcgtgtcaaaaacatatactaatgtgaaagtaaaagagtaacagctaacgatgtgtataagaagagagtagtatggctactttacagagcagtatgtatgcaagttcagttacatgtagcaaacaaaagcaaagaggcagtgtgcatgtgtgagagtattgttttggttttatttttatccttttccatttgcagaaaaggtgctccaaaaataaaaataaagcaggccgaccacgcatatttccctgtggccgatggctacctgcaacatggaaatgcaagggaagcagacaaatttattcagattctgccaattgtctatgcaattctttggtagaataagatggtcctggtttcgaatttttaatccttgcgctttatgctcttcagggaagtctttgaaacgcgtcgaatttcagaatccggtgcaagtactcatgaggatcgatgatgttgcgcgattcatatcgggctcaagaacatgttcctgacctgtttctgtttcaaatgcctatcaaaatgctactttgaatcagcttgaatcaacccaatgctgacccttattaacaataaacttttaacagtttttatttctgtttcaaaataaaggatttacatttcatcatgcaaacttcaccaaaatattgaatcctctaattaacaatgactgaatctaatctggggcttgcactgttcaagtactgatggagcaatgtgactgaacatgaacacagcagcctttgtctccaacacctccatatgagtgctaagcataaggcatcaccggccacatgggattaagaaacacacaagcaggttagtgcatgcataaaccccatttgcagcaggtcataatcagtattcaattgtgcacaagtacaattctgctgaggtgattaaaaagtgggcagagccttggtttctgcaagaaggaatcaaaaagattgttatttaattccagtaagccatatctcagcgtgatagatcatgtttgcagtgcccactatgctttggtaagatctgaaatttcatccactattaagatattcttatcttcgataagtaatagttttagccacatttagtgtgctttgaataatatcattcttctctttattccctggagaattattgttaagggagacctttattccatttcttgttcggccaattaatcaaattgtatatttaaaagtgtttattctggtgtaacctttgcatctccagataagatatttctgtgtcatgtctatgtacaataatcattttgtattaaaaaaactgttggctgatttacaagctgaaaatcagtcagctcagctaagaaaaacttaaattccctagcatcctagccttgtcaagtttctgaagagagatagttcttatctcaaccaccacggcatactactcaacttcactagtctcatgtataatgcatgaaccaacctttggacccaagtgacactatgatccaaaagattctgttttttttttgtgctcttctattttccatcctctgtgacatctacatctttaaaagttaacaataattgctaaatgcaaatcagaatcacttcaaagggttaatatataatggataaatatctgactaaattatttctctcttctccacaagcacacacaaacaaacacaaaacataaagaacttttttgacacaccaagtcatgctaaagtactattaagtaatgcagtgactctagtgcaattgagtacctgaagaactttcaagataccaacaggagaaccaaggtctatagttcttttctgtaggaagcattttttactatactactatatctacaagaaccagagttttccttctgcaatcaacacctacttactttatatatatatatatatatatatatatatatatatatatatatatatatatatatatgcacaaatatatacatatgtacatatcatgtagccggatcaaaacagaaatgtagttgtgtaatattcacttgaccaaagagaacaaatcttggcaacatatgtcatttaatacaagtgaaatcccaatcaattcaaaccaataatactcatatatttcaggatgtcactagacttgttagtccttgtactcacattcagagaacatcagctaaggtccccatcggttggtctagtcttattataagccataacggtttattagcgattaaaaaaatgatatgtgagtaaaacttttgtatatatattcttagtgattgaaaagccaaagttaaaaaaaaactatgttgaaaaaggatcaaattcaaattcaaaatcaagttttaaaattcaaattttggctttagcttataagccatagggcaaacgatgaggcccaaagctacatttctgcaggctctgaaacaatcaaaaccatcaagctcaactctcatctggatcgccggcgatggccgaccggagcaatggcggccggagacggagaaggagaatattcttggttggttcttggtgatatttgtttccctcttatgtatgcaatgcaatatgtgggtggtggagaggaaaggtggtggctgaggtgaggtgagaccaccttcttggcccttgattccctcccttttgcagcatgtcctctgcaatctccactggggtgagagctggctctactccatcaatgtagcaacctcccaggcaatgagtcaagcattgcagctagccaggtccattgcaccaattgcatctgcagatactgcactccactgcactgcagctgcagtggtccattccattccatttcactgcattcagtatgatgtagtgtaccctaagtatgtatagtgagactgtgtgtacatgaaccagttttttttctttagacaaagtaagtttttatttaacttagccaattacatcgaggaaatacaattgtactgagctaagcacggtctggtctctacataactaggatgcacacggtcaaaactcacgctcgcacccttacatgagctagttagcatggtgcattatgtgtatatatattttacaattgtcaatcacaagttgggagtggttggtgatctgttactccagttatacccactggaagatcagattcatgtgtggcagcagaatcaccaggaagcatgtggtttggtgggtaccaagatacatcatgtgagctggagccagatgaaaaaaaatgaatgaatgagggggtgtttagatggggctaaaactttttagcccatgtcacatcggatgtttggacgctaatttggagtattaaacctagactagtaaaaaaactaatttcataaatgagagctaatccgcgagacgaatttgaagtatttaagcctaattaatccataattatcaaaagtttactgtagcatcacattgttaaaatcatggcgtaattagactcaaaagattcgtctcgcgaatcagtccaaggttatggaatgagttttgtaattagtgtatgtttaatactctaaattagtgtccaaacatccgatgtgacaggacttggaataagtctctagaaagcagacaggcccgaatgaattgagctgaactgatgaaaaaaatctgtgtgctgctactgctgcctgtgaatgaatgagaggagctgagctacaagagttgtctgtcactgctaggctgctgctactgttggtgctgctgccattagttttcagagatgtgcaacagtgctggttggtacatgacaactagaaagtagtcttctagtacactcaaattcccaagaaaccaacagaaaaaagatgtagtagtggtagagaataggggggagaaaacaaagagggtaatttggagaatctctttctctctgcacaataaccatcagtactgtactgaacaaattctgagaaaaaaaaaaagaagagcaagcaagaaagaaaagaatactaagccagttaatacatttattcctgccataaaaagactggctgttgtcactcttattattcccactacctgtggaatattaacaagaatttcctgcagattgattgatttaatttactaccccaacatgtccatgagcatcacaaaaatgtagtactagttgcaacaatctgaggctagtagtaaagcaccaatataacattgcatctcaacacagtttagtaattcttaaaaaatataagaattactaaactgattaattcaaaagcaaacatacataccatgagtccatgagacagcagagagagagagagagagagtaatagtagtagtaattatatattgcacttccttgatttgttttgacagagaaacagaaagcttactgcctcattaatccttacatagttggagtacatgatgatgatgatgcatgcagaaggcttaacttaaccatcacttgatttaccaattacacaagataattaggccattaattagccctagcagctagcttagcttcgttaggtgcagtgcttagttgcttacccccagtggcaagtactgtaattttcttcatcttcttcttggtctctgccatggcagcttcagcttcagtgtttgagctagcaaagctggaacagctcgggggaggatctgaagaggtcgtcgaaggcggcggagtcgaaggcgaggagcgggtcggtggcggcggcgacggtgagggcggcggcggcggcggcggcggcgccgttggtgttgatgcaggagaggatgtcgttgagggaggcgaggcgcgcggcgagctcggcggcctgggtgcggaggacggcgttctcggcgtcgacggcgaggaggccctgggtggtgaggccgagcgcggtggcgacgtgcgcgttctcgcggcggaggtgcgccacctgcgcggtgaggtcgtcgaggtggcgctgcttccgcatccgcgaccgccgcgccgactccctgttcgacagcatcctcttcgcccgccgctgctccataagcgccctcagctcctcctccgccgccgacgacgacccccccgccgccgccgtcgccgccgacaccgcgctccccccgctcccgcttgacgatgccatcaatcaatcgatcgcaaagatttcgggagaagaagaacaacaagcaccactagattgctacaagcttagcagcagcagcagcagtgaagaacaagaagtgcatatactaaactgaaaccaaaatccaaaacgaacacgacgacgacgaagaacacacacagagatcgacaagaacgacgacgacgaacacgagatcgattattgtagaaggaagctagagagagaggaggagagggaaatggatggcgagtagcttatgagaagacatagaaccagtagaggaagacgacggagaaagactggacgagatgggtgcggcgccggagtgtggagttgatcataaaccccgagaggaggatctcactgatcacaggcgacatcgatcaggaactccagcacgaacggtataagcatgtgcctccctcctttcttccttccccctctctcactcgatcaacaagaacagcatgcaagaacaagaacaaagctctagctccctccctccctctccaatggcggctggggttataaagagcgaggaggctggctagcctagcaccggattcgatcggagcggtcggtggcaaaaggctagagctgagctagctactgccactgatcgatgcagcagcactgggcaagctgagccactggtgctagctacaactcgaggcgtctggatgtgtctcttgatgccaagtgccaagaagaggatggtggtggttgttggtagggaggaggagatgatcgaggagggggggtgtgggagcagcaacacgaggtggatttatagagaggacgcacccatctctctctctctttccagggcagtagagcaggggaggatgggaatcgcgccaacccgggaatgggaatgtaaaatactccctccatcccgataaaaaaaaacctacgatatgtagattcgtagtactagaacgtatcacattcaacagagagctgctacaaaacgggatcccgttgcaatgggatagacatattaactattctcttgcacgagtatcacaggtatcaggtcctagatatcacagataccgggtaacaggtatcacaggtatcaagtatcatgcagctggtatcacaataggtatcagatatcaggtactgtctcatagaagagtatcccgttccaacgaaataccgttgtctaggttttctgcatttaatactaggttggttttttataggacggaaagagtactattcaaaacggtatatttgtttaggtttttctctttacctaaggtcactttacgtacgagtgtctagaaaattaaaattagcgtggaatatatggtgtttatagagtaagcaatcttaaacacttgattttagatgtcatatagacatttgctaaatagtaaatggggaagaaattactgcaaatattgacatattgtattgagtcttgagagccgatatatatatatgagtacaagatttggttcttaagtaagtctagagatatagatgaaatataatcctatctagtataacaaacggatactatgatcatattcatatactccaattgttttaataatgtgaaagagatgaaagaggaggaaatgagccattcttcgtacagggataatctatacacaaacttcactaaaaacatgagagagtcttagagagttattgaggcttgtgtgttaacggcaacttattgtatatcttacaccttagtttatagcaatgataagggaacgaaaatataaatgcaccatggattatgaaatattcagaatggtactgatatatttgcatagtttttattttttcctttaaacgagttctcacgagtgtctagaaccgtagcattagtgtgaaatagtacgtgatatttagaatggtgtcattatctaatcgtcacttgccttcaagaacgggaggtggcattcaataacgactactgcacgaaaaattacggtcaatagaggttacctatgtggctatgcttatttgtatgtgtggatggagtacgtaccatccaagcttaaggggtctcttgctaattgatgagcttcctttgacgatgtgagtcgctaattaatatgtacgccatccaacattatatggtaatatgttgaactgattttttttaccaatatgatttgctaaataataggcgcatgctattgaactacaccatccatccccaaatataagtatttttaactatgaatctggacaaccgtgtgtctagattcatagccaaaagttgttatattttgggacggaggtagtaactactatcttcgttaaaaaaattatagctattttcggcaatacatctggataatttggaatggatatatataggagtgaataattccctcaccggtttttcaaagtaagttttaggttgaaacaagaaacatttatttgaaagtctaaatttatgagttgataacttaaatcctgaaactaggttgtgtttttttaatagggaactaggaggtgttggctgcttatgaaatgagcgttcgccattcatcacatatcaaagctccttgccaacaacaaagtagaacagtagtgcttcacttccactcctactctctcactcactcactacttgctttggaatcaaatcgaatcttcatcggatttcagaaaacaacaagacacacacaaaagaagaagattcaaagttgtctgaaaaaaaaaaagatatatacagggtaaattacttagcatgaaaaaagtagtaccactgtaggtccagtacaaattaattattaattaattaattaattaagtaaagagaggttagcttctagtgtttcaccattgatgctcgtgcgtgcgtgcaggggcgcacgtgcgggcctggccgatccaaggagatgctgtcatgctgctgagctgctctgatgcctccaggtggcttgcatgcatagttgcaaatgccagcttaacactgcagctagcttagctcccatcctgaaatgatatctacttccccaaaataattcaacacgaatctggacaagattcattgtactataatatgttacattctattctagattaagttattttgggactaagaaaatatttgacaggtcatgtttatttcgattcagattcaaatgtacgtactcacatattacaaaacacgaatacattttttttatgataaaagctttattgaattaacccaattacaccaagttgatatagccgtacctgaatacacatacacacttatttgcacgttccacctctgatttttcttcataatagaaaattgatttatgttttttcatatcagtttttctagccatttgcatatgcagctttcaagttcagtcttgcagtaactttcagagctagaatcaactgagcagacatttatatatatacatatatacatattcatggactgaactaagaatggatggataattcccgtccagataataacatcatcgagtggatcaggcagtagatgtagcttttatgttctttgctcctcacagaaattcagagtaaataaatgtccttttttttttcttcagtgaaaagttcagaaaaacacaagccgctcttacttcttattggctggagctctgtgctccattgtattgacccaatggccctacaaatcaacatgcatgcaagatgcaactccaggacaacatatttcacaatcatgaccctctccttgaatgagacagtatattctctacataactttctaatagttgatcttgaggttcagatttttttttagacataagtttagtacaatgaaaaaattttatgctactcaaaattctatatgatcatctgtttttcctatttcttaagtaaaaattagtccaagagccctggaattcactgaataatgatttgcattttagacctgaacaaatcaaacagggagtgaaaaatgaagtcaaaaacgaaattcagataattattgtgcagtgaattaactagtcagagaagattcctattggatatagatcagagatccagatagctctcaaaaaagaaaaatagaatcaagggagagagagagagagagagagatagagagatgcacaaaagctatcacagatcacagtgtgggtcatggggacatgaaagcagctgctacttgaagcagctaagctagcatgcatgctgttggacagacacacatatttatcgatccatctcgacttgattgataatttgatatgaacatgatcgccttagcttgtttctttctctcaaaaagaacacgatccttgttttcttttgggtttcaattaattcatttcctcctgaaaggctgcaacttttagaattaaaatctattaaaaaaaggatttgagggcttgaggcatcccatgcagtgatgctatcgcttttgctaagcaatatatatgcattttgctagctcttgtgttgtgtgcggttcatcacttcatcatcataatgagatagattcagagacattcagagattcagtgatgcacatcacagcacagcgttcggtctccatgctgccatgttggagccaaaagtgtgcatcatttttttaaaattatttttgtgatgaaaaagtgtacattattttgctgcagtgtagtgtagctagccttaccctgcccataccttagaattcatcaggccattgccggccgatttctctggaactgaaaaaaggttggttgcttgtgccttagctttgcagagcacatatctttacgtgctcttttactttgtataccacgaattaacactaaaagttatgcaaccttcctataggagctaggtggaaaatgagctcgtttcgctagctcggtgtctctgttcaaaattgctcgattgatctgtttttttcttataaatttaaaattattcaactttaaaataaagttggtatcactctacctcagttcattggcctgttaaccaaaaaaaacacacacctcagacgatagagaaaaaaatataataaattaattttgaataaatctcaataaaaagcataaccacctcagtgtgacagcgtccacccatactcaagtcccttactacacctaagaagaccgtaaaactgtaagtgaataatataaccttttcttttatccaatggcagggacaggggacggccagtggcatgtctcctccaacattttttcacacataatcacctaactaattaggtaattaacttaaatagtagtgtattatgtatccctaagactcttagacctcctctctcatgtttaaatcctgcctccgccactgtttttatctcatgacccatatatccataccaagtgagatgatcagtaattaaggtaaaaaaatgtagacagggtattacattatttatctctactttcatggcagatactatagtagtagattgtctggttactttggtagtacgacaagatatggaggagagaggggaaaaaaaaagaaaagaaaaatgtagaggtaatggaggtgcgtgcatgaagagatcaggcaggcatggcattgggtgcattgggggagatggcttctttcgcgccgacttccttgcacatgcgagtgttgcctagtcttgtgttgtgtagtgcgtattcagatccagctttgctcttgttcccacgggagagctgtcgatctttcacaaattcacaaagtgtcctttccttcataccataggttaaattggccaatggcaatagatcgacagtagttaatatttttggcaggttaaagcaccgctaaaagtaaaggttttcctttggtacttatgttggaaagtaattattttaactaaggataacctagctaagagaaaatggaaatatagtaaaaaaatattgcttttgtcataaggacaaaaccattcaacatttgttcttccattatcatttatcttgtttggtatggtatgttcatatggcctctaacttataacttattcgaaatgttactcatatgtttgggcgttggctttcatgtgttcctaaggaaataagaaatatgtttttgatgggtgcagcagctagctctttgttggtccatttggctaagcagaaacggagttattttttataataagttggtgtattctcctttgtagtttatcactttagttacccagtggttacgcacctgggctatcctccacaaaccggtattttggggtactactgcggtggtatcacgatgtttggaccaggtggcatgggattttttttactaagaacatgggtgatgatctagtatacggattaatagccactaatttctatgtttcgtgatgggggtttagtttcgtccttttattggttgtgtgcattttatataaaggttgggggtaggcttagttgctatgtcttaacttttaagacaacttttgattgctaaaagttcttgtattttgtaacggatggagtaattcggatatgtcttcaccacgtatttggatctacacttatgcatggagagagtgtttttctagatttcaactctaaaatatttttgtggatcaagtggaggaggttgtgaagcagggccaaaaggcaggtgtgttttcagctccgctctaggccctgctccactacatatttgtttctaaatcacttcacgtttggttcagctccaccttcttcataagaggatttgagaattgagatatatacctatctagctagtggataaattaaagatccagaatatcatcatagattcatacactaattgtcagttaaactgtccttcttgcagatatggcccaaagtatacatagtacagtatagtagtggccatacataattcatggctctcgtgatcctagagagctcgatcagagaatcactttatggtgacagattgagacttataaatcatcatatcgtcaggctaagcaagctagctattttgatacatacatgcatgtacatagctgcgtatatatgcggtggttaaggtgcatacaaacagtgtgcaccgttcaaaagatccggctactgcatgccactatagctcgatcatcaggaatagtgagtggtagggacgatttagtttagggtttgatgcatcattatatctaatgtaagctagatatatgatagggtttttgtttggcattgtagctcatgatcagtgtgtgaagaggtacatgatgtatagtggtccttgaaaagaaattattggggttgtggaatactatcaatgcatggccctgtttaagtgggaatattaaaagtttatagggagtgtctagatttcatatatgtctcatcccttggatgatatccagtggttttcaacttttcatcattccccctattactcatccaaaggtagtcatgtctttcttattatatagataaaaggttgaacaacatatatccaattgttttcatcatttcccctattaattaatcattcaaacaaagtcatttattccttagataaaaggtcaaacaacaattattctaacctaaacatgaaataaattttcaattcataaaaattacaaagttatatgtaaaagtattcaaccgataaaactaaagtaaaaccatatataagcaataacatatatacacagttcatacaaagtaaaaattgtacattacatacattgtaattttagagttagcaatatgcaattttaggtgactaaaaatacaaaatttcagatgtcttgaatattaatctagcaaatactaatacctctccaccaatccttatgcaatactctctccgtcctataaaaagaaaatcaaattctagctaagaatttagacacccatattttcaagtttaaaactaggattagtttttttttagctagagggtgtaatctatttctacaccttaagagatattattgcacaataattctttttagagggattgcacagtacttcctctgtttcacaatataagtcattctagcatttctcacattcatagtaatgtcaatgaatgtagacatatatatctatctagattcattaatatcaatatgaatatgagaaatattaaaatgacttacattgtgaaacggaggaagtatgtgtaacttcagtaaatgatggcgtgctagacttgaagccttgaatgctaatgttctggaatgttccacggctcaaataaggcctatgacaaagacaagtcggttcattgaacctgccagtatatttgtcaggcctagctaagctagcttccggccggttcagtggtgtgcgatccctgacaagcgtggctgacccggatgcatcagcgccacatttttctctctttctggatgcatatgggttcacttttttctgtttatatgtttttttcaactggatcagatggatgaaattaaatccaagttggatatatctcttgtggtggccaataaccatatgagaaaattttcacatacagaacagacatagatattttgattcctcacggaaaaggagaatttggttgttgttgttagcatcgatattgtgcgcattggtatcttttctagcacaacattagaccctgtttgagacaaaagttttcaatgactacaaaatgtgagccgtccatcagaattcatgtaatctctccgttacactatattaagtcgtttgacttttttcctaatcaaacttcttaaagtttaattaagtttatagaaaaatacggtagtatacaatcaaacttttatatatatatatatatatatatatatatatatatatatatatatatatatatatatatatatatatatgagttggatttttttgcatgcgagttcacatgtacccacaatctacatcctatatgtatcttgcacgaatcttagggcaagtatattaggttctaacaaaatgtaacatgcatgatatttacgttatactatattttttacaagtgtaaaataccttgtttatataatttttgtatttcttgtatgcaaaacttgtttatgtagtttaccttgtttatataaattatcttgtttatgtagtttttgatggtaggatatatatcattttggaaatattatttttgcaaaatgacaatttggtgatatagtagatatattgttttctcattttgactaaatatcatgttataaacaaaataaggattagagaaatacaatgcactagatatataaatgtcatatatgattattattgaaaaatttatttggtaaaaaatgcaacatacatgttatacatattgtgaaccaacctaatcctaattatcttttctccctatagtaagcattcatttggttaaggttaggtacattttgcagcacgaatcttggaacacatcaacggtgtagattgtagttacatatgaacccgagtgcaaatctgcattttcatatatatatatatatgtgtatatatatatatatgtatatatatatgtgtgtgtgtgtgtgtgtgtgtgtgtgtgtgtgttgtgtgtgtgttgtgtgtgtgtgtgtgtgtgtatatatatatatatacatatgtatatatatatatatatatgtatatatatatgtatgtatgtatgtatgtatgtatgtatgtatgtatgtatgtatgtatgtatgtatgtatgtatgtatgtatgtatgtatgtatgtatgtatgtattatcatactctattcaatggtagatttaatggaactaatttgatatttcatatggtgctaaacttttttataaacttgatcaaacttaacaaagattgactaggaaaaaagacaaacgacttataatatgaaacagaaggagtattccaaataagctgttaatctatatatagagagaccaaatcggataaaatagaaatgacataaggaaaggtaaatctttatcctatatattgttggctacatgcacctctatattttgatacttgttatttccaatcagatctcaatggttcatcaaggtgtccaaatgaatggcacacaatgcatatagctagacatatagtagctctagctatacttttggtgatgaaatatgtggagagaggccggtgcatgaagctgcccagaggtgtctaggcttgctcatatgaagcaccatcaccttgagatcctggagatgatttgatcactcaagctagctagctttgccctgttgctatcctgttaatatgtgtgtgtgaccactggagcaatgaggtgacaccactaggttagataagctacccaagcatcaatgttgatgtgtgcatggctgcttctttcttagtacccaaggcataattgcaccacaagctggtagctaggaaggaaccctagcttattggcttagttgtggctgtagtaggagttttgtggtgcagtgcaagctcctaaaggacatgacaactgcatgcatgcatggacctaccacacccaaatgaaccattgcaagttgcttaccatgcagggattatacatttgtggtgcatagcttgttacatggacttcttgtccccatgtgcaggattttaaaggcattgaataaatcgacgggttatcaatatgcagaataatactacaactataaatattataagttttgatcataattttaaaagtttaatcgaatcttgtcataaacatcaaataactatgacgggataattttttaaaagaaagaaaaatgaaatctctgaatcgggtataattaaaatacagctgatcatggatgagaatgtgctagctgaattccttttgatccaggccctcacatatctctggtcaccaacttggctgctcttgtgggggagtatatttgtgtggttggggcaaggtccattaccccacagttgcattgcaaacaagctaaggggtgagaaatatctaagctacattatgcatatgtgcttggggttgttgtagggtatgaaccacatggcaaaaggagaatctcctcccccttctcctaccaaagattcaaggcttgaggggtaaaaaggaagttgtgtgtgtgtgtgtgtggttgtgcacctttgggggagtgaagctaagtggcatggcatattgggttgcatatgcatgcatgcatgcttgctagttagtggcctgctgatccttagtcctgtgtgctctgtgcatccaatgtttgtgcatgcatatgcttctatcctggtttctggttttgcacctaacatgtattccttacactaatagccttgcggcttggagctgaacatatattgcatcaagaatttttcttattttggctaattattcttttcagtggtagggatatatatatatatatatatatatatatatatatatatatccattatcataaacgtaaaaaacaagcccactctcttagagatgcttacagaagtaagatatgtgtattgtatgattttattatagggctaagtgttcacacgtatatattagcttgtgcgtttatactctatttcgagaaaagggttttctatatgtttaaacttttcttaatatgactataagaataaaccctcttttggaaacttatgtttacatattcaccttatttctcattttgatttacttttatcttactttttattactattaaacttatggttgtgtgtcttatgacaaaagccaaaagatgtaatccatttccattatctaaaagaaaatgtttacatatgaactttttagctaccctgtttctgtggcaggacaacgttgtcacattggtacaaaaggtgttcttatctgtattcaatacactagtctaattaagtacaccaaattaatttgcaagtaatggtacaccagctaaccaacttgaagagattgtgtcacccggccgtatgtacaaaactctaacatgtcaaaaatataaaacacaaattgactagatatcgtgccccagtacgtccataaaaacataaagttctttatagcaaacaccacagaaatgctgggcttcctttacgaggttaaaagctcgcttgagactggaatatatagtacgtgccagggctgataggacggcttaactattttgataacctctcaaagttccaatgtttctttatttttttctgtaaaggaaaaaggtgcgcaaccaaataataataataataatagcttgactacaaataataaaattaattaaagcacctgtgatggagaccaagagcatgacttgggtatatgccaaaccgtcttgtaagttaagcctgttggttccatattcttttttaattggggacacaaatgagccgctcgttttctgcatatcttaggctttccatggctttgcatatcttcaactagacaatataatgtactatccataaagcaaaaattggatcattacagcctcgtctcttatttgcatggaccattcatcttatctagttagtgtgtggggtgtgcgctcctttcttgcttgctttctctagggccagcgtacaattttcatgaaccatttccattgttaggttcctgtcagaaccttacatggtataggaaagaaaaagtatggagaaaaggaaaaaaaatacagggttgttttcttcctctttggttctgagctatccaaacatattagcacgttttaaggtaataaaatggcagtgcccaatatctgttagtgaaaggaactgatcataagccatcatatattcagctatgcaacccgttttgcaattgcataccatgaattagatgacaagatcaaaagacaatcttcaccataaccattgtacctgtaatcaaaggcataccccaataaagaaaaactagaacacaaatcataacttctacaacaatgctggttttagtaatgacttgagctgtaacaggtgcaaaaatgtgtggctgttacctatctggttaagatattatcctgtgatatcttggttgcaggctgaggagtacaactattctgccctaccaatctcaatctctcccctcactccactcccaaaatcaaacagggcagatctttttcctggttggtgaggctgtggggcagtgattgtttcactgtgaccaaaccctagccttgtggtcacatgggaagcactatgagcagagaggctggctagctaggtcttggccattaagccaagtgggggctgcaatgcaattgcaatgcagggagtggtggccagtggtcacaccaaaggcctcaaatgtggccagtggtctcgccgtctttcggtgacggctcccatgtatgattgcttgtttcaagccagaaacagaaacacatgtagctccttgaagcgggtgcaggtaattccaggcaccaaactagaggcaatgttcaggaaaagtctgtctattatcaagggccagtatgtgcctcttcagcttcatttcgaaacacctcggttcctgaagcagcaggcttacaggtgctcccagcctataaaagagcatttgaacagtaatgagaaattccagaaaagaaaagggaaatcataatatagatattgatgttatccatcgtcccacagaacttcaaaagactaaactcgatctacacattgacaaaaattattcttctgatgaggaaatctaaaaataacagtgaaatttatctttttcctctttgtccttgtatataagtcatgttttcagttgaaatttatgagatgatggatgattctcacactaaatttttaaagttttaccaaaataaaatcatgactgtttgcatgttctttcataggacgggagtgcctgaaactatcccaacagtataacaaaatgtgacatacaggatatttcacgaaaatttccatcatgcagtttctattaatgttggactcatctgatcattattccttaatgaagacatctaacaggatgagttttcctagaggtaacaaattggtttcagtatattttattataacagaagtggcaaatttaatgagtttcttataccttggaagcagctctctttattgaactggacctactggcagaaggtagcttaagattctggctgcagtatgccatttgacaagaatctattatgtaacgcacatgaacatcttcctttggtatcttccgcagcaacttcttagtcgccttcttcttctgggacaacaaaagagcctgatacatcctgcaggcacaaatgcagtatatctactaaatgccacaataaaaggaatttgacaaggttgcaaagcaagcacactggtcaaggtatcgaattgcccaacaaaagcaagccaacattgtaaaatgtactggataatcagcttatgtgccaataggaagaatctaacctcaaggaagtcagtacattatgtggaaggcctgcagattcatattctgtccatatcagctgggcacgatttgaatcctttgcctttacacaagcactaagaagaaagtcaaggcttgtccgagaaacattaagcccaagctctttcacagcatggagaatcttcattccaaaatccaaatttacaggatccatatcccatatttgactgaagaccttgaaaaccattcatgaaagtaaacaagaggtaccaaaacaaagaaagcatggaaaaggtatagttcatggcgaaatgtcttgaggaacaattcatatacacctttatgaggaacaattcgaaggagtttgaacagtaaaaaattaataaaagcaattagatatttgtaatcaaaatcaagtttggtttctcatcatgtcaccctaattaaactgaaatgaatttatgaactagttaacagaataataagcgagatcatatagcatatttcctaaagataagaccataaccaagtagtaaaaaaaacgtggataacattagaacaaacaggatatccaatgtacccttaatcaaaaggaatttgccagccaaaaggtatagattctagtcaaaatcagtgccccccccccccccaaaaaaaaaaaaaaaggaaatcaaatgttcatgtgctatcctatccaagaataacaatcaatacctgatcaataaccatatatgtactcaattcatctttctccttaagctgcttaagcaaaccaatggcagcactggaaaagatgatgaaaataaagagtgaatgaaaaataaaaagtaaacagaagtataaatacaagtgcttaaatatcgattagcatacttagggtgattgtgctgaacacagtacagaagtactctactgcacccgtcaaaccacatgtttgagtcaccaagctcttccagaagttgatacagtctatccagctcaccttttgtttgggtattctcctgcagaaaaaaaaatactattaaggatggagactagaacaagtggttctcaaacgtgtaggcacaacccatttcttcattagaagtaaacatacgtaacagttttacttacaatcagggctattgctgattttggctcaaggtggcatccagattgcttgatttcatcatacatgataagtccatctaataccttcccatttgatgcaagagctcctataagcgcactcttaatttcattgaggtacttaggtggtatttccttgttttcgagaacctaagaaagcagcaaaggttttcagtagcaaaatagaacaagtacaacattagcatcttcgtagtaataataatagccattaacttatgtaatctaattcagaaaacacgagtacatgtgtgagatctggcacctgaaggtgcagcaaaattcaaagagaattatgatcggcaagcacattacctgtttagccatgtcaaaattcccaagtcttgcatatgcactaactagtgacatatatatatgcttggacatgtgtattccatcttgccgtaattgatcaagatactgtaaacaattcaacagccagtgcttatcccaacagaaactataaattgaaaggggtttaaaacatgaaattctaatgtcagtgtaaactatggtaaagaatcatgccaattgttcaatagtatatggcgttttagacattggcaaaccctccaatatgcaacttcaaaaattactttaaataagtgtattagtaaaaaaaaattaagatttatatgacaactctaattgcaccatttctgaaattccacatgaccaatctaaatatttttttacacaatgatggtcaaagataaagaagtttgactacgcgtcttttaaaatgtcagataattcctccattttcctttacttgtcacagttgaccataattttgtgtctgagaatacttggcactatacatttgtcacagtggcattccctattttgtcctttgaggaccaatcataaatttaacaatatgacattgatacaagtaatcagaaatatctagagtgttctttcaaagtttcgattatacataacgaaaacatattccactcacctaggagctttggttattttaggagataaaagttgattgcattgatatgtgtaccatagtcaacaatgagacaattaaacagaaaaggagggagcatttccgaacagagtaggcatgttagtatgtaatggaagatgcgacatgctgcatgatgatatatccaacagaatttaacaatgcaaatagaattaattacttggggatataatttcactaggtgttctttcaagaacatatacagttgcctctctatttgaaacacacacaaaaatggtaataataaacaatcaggtatgtgacaaacctcagagattttctcttcgaactcacagttaaatatcaaataacagtatgtttcagaatctggttttactccggcaatctgcatttgcgccatgaccatctgtgctccattgtggtttttctatatagaaacatagcgaatttaaagggagaaaggcactaaggcacaaacaatctggaataatagtctttaaatcttactacagtatgtaaatatggtcttttgctaataataaaaaaatcataactactgggtaagtccagcagtgtttcccctcaaaaaaaattttgaaatttcatgccgttttcatactgaatagttacagtggttgcttattcgaaactgttgcgcatttgtacttgagggaagaggtttggaaaatctcaacaaaaaaaaacaagcatgtgtcatctcttatgtgtttatgcatttctactgaccaggcatgatgtaaaatcgagtcagctaaagttgagcaagtatgctgacaatagttaataggagatccatcattttttgaataattaaaatggacatatggattgtatggtaactgaggaaaacaaatcaaaagaacaacagataacccgagagtttacctctctgaaatatccaagcatgatagcattatacaggcttacagtggatatatccccagactcttctgcatctgtgagtatacggtaagcaccttcaaactggggagaaaaaggatcagtaaatttcatatgatgcctaaacatagcaggtgacctgcataatgacttacatctttcatctttacacataaatttatcatgtttctgaatgtttcggttttcaatttcatcttgtggcgacgcatcaaatcatatattggatgaacctgaaaaggttagagtgaatacagatgcttagcattgttcccaataagacatatcacatgagaacatgtatagttaatttttaaaatagatgctacctgtgagaccagcaacagtagttcatatatcttatgacttatgatgcgtggcagagacttcctcacaatcaattttatgctttaacaactcaaacaaatgtaaataacagcttattaagatcactagttagttattacattacaacaatgttaacgattgtactagtgctttaataggttgggatgtgttcatactagaaaaggtcatgttctacaagatgcttatgttgttactaaaaacatatgcagtcatgcacaaaaccatacaaagcacttaaatgttgcaaattcttataacctataataccccctaataattaatataaaatgaacacacatctgcactgcaagccacaactaaatatagtcatatagaactgcttaccaagtgaaattcagagccttgttcacaggcctgtattattggatgaaacaattcaactggcatatcggggttggatttacataagcactcagctacatcaagagctaagctgatctgcataaaacattagggaacacagcgcggttataatattgatttgagtggcccagattgataaatccaaacacttcacattgaaactaagattgttgtaccaaaatatgtgtatcacatacaatattgaggcctatttggtttgtaaaaaactttgctataactaattttgggcaacaaaattcacagccatggctgtagaaaaagttaagtgacaatctgagtctatggcatgcatatggcaaagttcaatcacagaaatgagcaagatatttgcctaacaaactgtaccacgcctaaggtttcatagcaaggttactaggttaggcttcaaactaaactccaagctctttgctacacttcagtggtggctacccaaatggtggccacaagttcagcacacatcagccaatatccattaataaaccattccaagtgaccacacatttccactgcatccaaatttaaataagcatttcttcccaacacctaggtggtggtagaagaattttaaataaaaaaaactaccggtggactgatagctacttgaaataatagaccagataggtatgttaggctgttaggcatgacatggactctttaaacgtaaagccggttaagtacccaggccagcagaaaccaaacaacacaaagcaaaaggtatgtatggacatggcatacataaaaaagatcatatattgtttggggaccaaatttctaaaaacatgtattgaattacttaaccattttttttaaaaaaaaagtaccggtggatttgacttacctttgacgatttgcaacaaacagagatgatcttctcagatgcagaaatagagggtgctacctcaaactgctcatgccatctattgaatgatactataacatcttcaaccttcaagaaaatccatttccagtgttcttatcattctgtttagctaaaagggcgctgttaacatgataactaactgcactggttcagatagttatattttttaaataatgtcattcttagattgaacaccacagtttttgtaagcaagtcacgaaaactaagataccccctccatccaaaagtctaagacctatttctttttgcaccaagaccaatgagtaattaattcattcatcatgtgacaaaatcaatgaacatgcaaccaataagtactaaaatggcttcttgggctccgctcaaaaatttaatatagcacatagtgactacaaatatgacttagacttttggaaaagccaaagaatggaataggtcttagacttttggatggagggagtagtatatcagcaaataaacctttccatccacttgggatcaaataaaatgtggtcatattagcaatttgatgaaacatgatttatctttcgatgtacgaataaaaaaaaatggattgtctattcttttgaatcacacagaaataaatttataaattttctatgctagtttagcccaaagcaccatgttttttagccacacaatgtgcattatggaaatgcagaatacttctttcgcacagaataaaaatataatagcaaaattgggtgtgctctctaaagtactgtattacatattccttttttttttaacatcttgctataagaccatttttgcacaggattgaagaacgctacacgtaaagtccactccaagttcatactataattagcggctacgaatattaccagtagtcatcgtaaaagattcctcaccgctatgtttggtatatttgaagcatactcaaatattatcgatgaaaattttccaacaccagattctgaaacagaaacattagcaggtaagaaacgtaacagagggaaatctgatggggtaactgaataacattagaatagaaatatttgtggccaatattcatcatatgtccatcttatttccagcaaatggatatttaaattttttggcaaaacgacagagttattacctttcgacctcatctgctgaagaagcttctcagcatagttcttcaattctaacctacccaaagactggaatatggtcaataagtactttgagcgtaaaattcttgttggatcaagtgactcaagcaagctgatgaaatccagcctcctgtcgctttcagcaaaggccagcatataactttctgtaaagcagtatcttgaataaggtacagttggaagaatgttctgtgtgtcgaataaattgtgcaacattaaacagcgcttttcccatttgtgaatgagtgacaaaggaagattggttgtgattttggttagttacctgccatatcatagtcaccttcttcattgaagtcttcaacagagcggcaaagttcttgaatcttttcttcatcttgagctctaatccataacaacatctcgtaataagctattctcgagctggaccgtggatttgcatccttaaagaacacactgaacatatcaaactcctctgacatccctacatccaccagatacagaaggaatggtccataacaatcttccacaatctgataacccctttctctcatcagctcaaagaggcgatatgccctataaatatgctccactgctgagtcaatatccatgcattcctttgccttgcccaaacaaatcctgatcaaagcattaaactccttagccccagtatccctccccagcttcccaaagaattcaagcgcgggctctgctccaagcttatcggcacacttctgcatcaacctggtgaagcggcggctctctgtgttcttgaatatgtaccgtttcttcttctcccttgccacctccttccgccaggccgccagtgggttgctaggtggtggcgccgcaaaccactccgtgtccagtatcctgttcacgacagactcttcggcatcttcagactcctccggtggcgcttgcgcccccctcaattcttctgcatcatcaggtcctaaacattgaacaagtatatcacgattacaccattagtttccactttggccatcgcaaaatgaccatgagatagtgtcagactgaagtttgatgataccatttaagatggacaggatctccttggtgaaaccgccggaagggttctcgtcctccacagcggctacatctgagcaacacaatcgacaggagtaagcgagaagcgaatgggggaagcggaggagagcagtggtgccggttaccttgggcgtcggggagggtggagggcaggttggtcctcttcgaggaggcggcctgcttgaggcggaggagggcggcgggggagaccgcggtggccggcgtgacggccttgcggcggctggaggaagggtttttccgcgtggcgagctgcgggccagttgcggcggtagcggtagcggcggcggcggccttcttcgtcgtctccagaactctcttccacatcggcggcggcgcgcgcgggggcggcggtcggagcagccgccggcggcggcggggagcagtggtgtggtccgcgccgccgcggcgaaacgaaggaggggattgcggttcggtgtcgtgggctgggccgcacccgagaaacggcccgaaaatagcgcgaggcgaagcaccaggaacttgtttgtaaaaacaaaaaaacgaaggggcgcaaaagaaattacgtgaacagtaacaataaaattgtcgatgcattaaatttagggaccacctatacatttatcgacaatttttctcctaaaaatttgacagatgtaattatagtacaatcgtagtgtaattatacggtaacttgcatgtaactacaatgtaacttgtatgtaagtttcacataattttgaatcgttagatctattacaatatttgttctggtgaggaaaaaaatcacagcacacacatgtgaaatgatttgttcccacgacctccattttaccgaaataacatgttacggagagatttttaaaaattacatacaagttacattatagttacagtgtaattacatgtaagttacaatgtaattacactacgattatactgtaattacatctgttaaatttttaggataaaatttattgacaaatatatagaaaaattgttaaatttattatttctcttataattataattaagcataactagtggcaaggtaaattgcaaacttaaaagtgataagggaaaaaacttaataggtgcgtacaattagatgtaaaagtaaaagctcaaaaattgaacgtaacattccaatatcttgactaggtgaatgcaactgtggttcaaaagaattttttgccacaccattgaccaacctagaagaaaatgccacatcagctatgtcccctttcacacatagtgttaattttacaaaatcatccagctctcattcttactagcttggaatttttttttcctcctttgggatgaatcaataggtgcggtggatttctcacaaatcaaagatgacacgaccataactaccgtcagaacttgggactcgaacgtcgatggatccttataaggacgggcgattgggggtcacacctgttgttagtactcaaagtgagtggcggcgtgacttgaatccgatgtagcacctcgtggcagcgaccgacctcttccgtggctctgtgccgacgggagaaaaaccttaaaatcgctcggcggtgtaggttccctagtttgatactagcatttgttagtacaactacttgcatgacgtgggttggaaggggcagaatcggatcgatggcggcgacaaccttcgttagggggcttggcggcgggggtggcagcgtggacgaggaacgagaagggagcgatagacttgcggcagcttggagcgctgggggtgttgagtaggaagtaagtgagagaagttgttttggagagaacaagagaagtgggcggaggaacaacaacgaacacacgcggaataatgcgatggagcgctatccaaaggactctaaaccattaattgtgtggaaggatccatggatggacttcaaaccttcgatcgtttaggacccaccaccatcactacaatttttttaagtagtataatgaattgatgataaatataatattgaatatattttgataatatgtttgttaattttatgtttgagatattgtggtatttttctataaacttagtcaaatttaaaaagttttaataactaggaaaaaaagtcaaaaataacttaatacctctctatataaaacagaggaaatagttagactaggaagtactgatcatagtatcagtagctagtaacgacgtgtttgtactcaacagaactgtagatagggctcgccgtccggcgggaggtccggcgtgcaagattccaccctgacgaggctctcccggtaggcatgaaaccaacaattggtgtgcccgaaatgtccacagtgtctcggaacaatagtgcgacggtgcgacccaccaccctcctgtccttgttggtgtcgtcgtacagcaacttccaagcccaggtcaccaccaccatctgcacgccgccgccgccggactcgaacgtcgcgacggcgttcttccagctgcccttgctccagtaggcgagtggcgcgggcggcggaggcatctccacccgcagccgccgcacccacctctcatcctcgtccaaggcccagacgtcgaggtgcagctcggtcatcgtccacacggccggcgtgccgtgcatgtcgatcatgtcgaccagttcgtcctcggcgaggctcaccggaggcggcggcagcaggcggaacgcctccgacaccgtgtcgaacgacgatatctgtggcttgccgttctgcaggtaacgggggcggcaccagtacacggtgtcgccgatggtctcgccgacgaacatggtgcagcggtggtagtcagggccgccgccgagctgccgtggctcggcggcgccggtggagaggatgtaggtggtattatctaggagtgggcggtggcacagcacgcggtactcgccggacggccggtggaagtagaagcccagtgtccgcagctcgttatcctttggccgcgacgacggctcagggctcaccggattgacgagctgccgcgtcgccgggttgcagatgagcatgccccccttctgcactcttctgaacatcaggaggccgtcgcaggtagtcaccaggctcaagcagaatctgccgcgttgaagcaaacgccggcagccggcgatgtcgccgccgtcgtcgatgcgtggaacagccgtggctgggagggaggtcaaggtgtagacggaggtaaagtgatcgctggggtccgtgtggccgaggagctgaagcgggcggcggcgggagtaggcggtgatgaagtagtgggcggtggtgatgcggcgccaggtccggcagacggcgcgggagcggaggacggccttcgccggcaaccgcaggaggatctcgctcaccacgtcgtcgttcatcgcggcgcgagctaggcgatcgttcggcttaggtttgccccggttgctacatatatacatggtgtacgttaaaatactgattcatatgtcacctagtgccgatcaaatttgtatgtcgagtttgacatggtgtgagcgaataatccgcttcgaattaggggcttctttaatttcgatgggatttcaaactgtcctgtatttactatatatgttagagtttgggaagtggaattttgtccctcgagtcgatgggacatccccttattttatacatgtcattcaaaaagttataaaaaacattatcaagatagatcaatatatgatatttctttttcaaacatgcgagttaaaatttgatttatataatttgaaacaaaaataataagattgaccgcttgtcgacgtttgatgtcgtgattccggtatttgcatagaatagggatcattagtactaggatatatgtgagattgtaataaaagagatggggacgaggatttttatacaggtccgagcccctgaattgtcaagtaataatcctatttctgttggccaaagccggtcgttactcttattcaccataatcacaccagtacaatatttgaggtagcctatttaactgtggtcgacttggcggtctgaagtgctgactcgtagttgacaacaaggtagacggggtcgacgagagcgagcaggcggcgagagcgagcgatggcaagcgacgaggccggagctgaggcgacaggtgggagggcaggcgagggctggagctgcacctgcgctgggcggcgaaggaagcggcggagacggggtcgacgagaccggtgccgacgccatctcgcccccgctctcatcctcctctgctccactgattcgtagcggcggcgcgcaatgaggatggagggaccaacgcagaggcgggaatagggagtcggatgatgaccgacgattctcctcaagctcaacctcgtttgcgtgtccccgtcgttgctgagccggagaggccggatccacgagcgcaacgttggagtagtcgctgcgatcatccatggacactcgcctccgcttctctgtcgcctctctactcctgctcatcttgctcagctccaactgctgctgcgcaagtgcgatgcgggtgggcaatgcgaaaagcaatagacacgatcgccatgcccgtcgacccattcacgcacgtacgctgtctatagcttcttgctcttgtatttgttcctcttggtgatggatctcccatgttgttgctgatactcgtggattggattggttgcagggcaccggccgagctcctcttcaacagctactcatcagcgcctcatcgcgaggatggatcggatgcgggtgcgggtgcgggcggtggcgggctctaggtcgtcggagagagaggccgcaaccccggccgccgcgacttgttccgctgcaccccgatgccaccggccgccgccgctgccaacgaagaaagagagaatataggaggggaatcactaacaggtgggccccactttatttttttaatttatttgatgactatgatgccacgtagacgccatgtcagcgaaaccgtcctccaaaaccgtcaagggagttaaattgcaccggttttaagagtttgggatcgagatatccggttttgtggtttagggtcacggattaaatttcgatcacttttgagggttacaaagtgaacctattccttctatttttagcggatcaaagaatagttgattctatagatggccatatggcccgaggcccacggcccggcacgaagcccgcaattttggcccggcccaagcacagcccggcccgactagggtcgtgcccgtgccggcccggcccgacagccgggccgtgcctgggctgcaccctcggcacggtgggccggcccggcacggcccgatcaaataaaaaaatacagggacgaaaaatagacttatataatcgtataaggcatggcccaagacaataggtatacaaaatagacttactatccagccatttaaacacagcccacaaagttgaggaaccaaaaatagacttatttccagccatttaaacacagccacagagttgagggaccaaatatagactttttctgtgaggcagcacaatagcccatcataccttctggccggcccggcacggcccgagtggtattgggccgtgcctgggccgtgtatgccgcccgtgggctggcacggcacggcccggtgcgtcggtcgagccgtgccggcccgacaagcctcggcccaggcacggccgggcttgggccgtgccgtgccaggcggcccagatggccatctatagttgattcaagtgtggttatctaaagctacacgtggccttcactcagctacactaacttctctatccaatctagtcgtcatttagaactggagaaacaccttcactcagctagtcagctgcaccagctccatccaactatccaatctagtcgccatctagaactagcaacagtcctctcagccttcactcagctacatcagcttcatccaactgcatcgaagaaaatacaccagctccatccaactatatatccaatctagtcgccatctagaactagcagtaacactcctattagccttcactcagctacatcagctccatccaactgcatcgaagaaaaggagaagtgttaatgactaccattgtgatgacaaatctatatattttttctatatatttgtacccactaactcgtaaagttcaacatgtaagtgtgccacatcatcatccactagcaattattatctcgaatattttacatctcatgcaaatatgacatatcatttgtaattttgttgtatttttagaagttaacatgcaagcaatgtcaaatcaccatctacacatcatttttatattatctaaatatatacatatattatttttataacatataacatgcattcttccatataaagtgtgccatgtttagtgacaaatataagtaagggggtcaccttacaaagcctcagcttgccttcttggatgactgctaattggcctggcgttgttctactccattgagcataaagacatcttgcagcggttgcctcgctaattacctgtaaacggactgactattaatcgtgcaatccaacagttgtgtttgcaacactaagtaggtactcctaaagataatggattcgggagaaccttgttagttttcttgttccagaccaaaatcttgttgttcttggtacacgcaagcagtaagttgggattgtgtgggcaccaagacatagcaacgatacctagcacatatagtaacatgatgttacaatccactactacatacactagcgagtcaaattaagagactaccagcaaagattgtaacatgatggtacagcataaataaaaccgagtaacacggactaccttctgagttactgaaggggatttcaccagcaggattatgatccgtgtttcccatgttcaaaatctgaaacagattaaattatccagttaaattaattatacttgctcaagtttagttaacaagttgatgttcctgtctttccaagcatattcatatgcaacggaaaaaaacagaaaattacctttacagacggtgaatcttcccgtgcaaccagcaacttttctgaatcaggatcaggacaaaagatcacagttgatccgctcttagttttgcaatcaagagtggtactgtaaaaatctcaatacattcattagtgagcaacacaattagagaaaggtgaaatattaaaaaaaaaggtagttaccatccaatgatggtttttgctctggtatcatggaaacctgcattttaatataaaaaataaaataatgattaaatttctaaaaaaatacaaaaagaaaatttagtcatgtaagaagaacttacatattcttccacaagtggttgtagatgctatgacatgaactttataggagttccagcagaggcaagatatttcttcatcaggagaatcacataactgacaaaaaaaaaagagcaaacaataaacatgttaccatctactcctcctaaataggctatatattgtaaataggtgtgttttttttctagtgaagatgaagttagagcaagcaaaccaagtattgatatctgatggcatattgatatcgtgaaaaaaaaaggtcacttagcactcgttaaccaaaacaacacatacttagctaaattgttgcaccaaagtactaaactatcaattttttgtactaaaacacactcacttgtcaaattgttatactcggatgtttacatgtagtatgttgtacccacctaccaagtttttttttatcgttgatgcaatttactcgaacttaaaaatagatgtatttgatattaaggaacttttatgtagaacgttttcgcacgaaacgtactccctaactaacttgtggctatgaatctggacgtggctggatgttggttttttttatgggatagaggaaatatcatatagcagtttgaaaagcgtgctaatgaaaattgaggtatattctacatcttaattagaaaaaaagaaacaacacacaactgtatatcggagggtcaatgacatttacctgaacagggattgtctcagccaaaggatgggcaaggtcatacagcataatccgcccatcagcagcacccgaagccagcagattcggtgcattggggttgaacgacaggcctctaacctgtacaaaacaaaacaacactgctcaaatatttgatcacacagtttgcagtttgttcggttcaggcatggttaaattttcaatcaaaaaggaaaaagcagagcacatctgaaatctttgatcacactatttgcagtttgttcagttcaggcatggttgaaatttcaatcaaaaaggaaaaaaaaggcaggcacatctgaaatctgtgatcacacaatttgctgtttgttcagttcaagcatttttttttatttttttgagaaagagagcaagagctctcccatctcattactgaaatgagctagagcagcaaaaggtaggaaaaaaaacatgacatcactcggacagacactactacaaaccaacttgtcttgaactactggatcaaacacaaaataatgcaggaaactgacgataacagccaacatcttcttgcccctcttttgcaagggatttcttgtgtgacaagttcagccaaatccccaacctcttagttcagttcagttcagttcaagcatggttgaaagttgaatcaaacaggaaaaacgcagagcagtagcagagtaaaaaagcctacgcctgaaacgtgcatgccgccgagaaacgatgaatgcaccatccgagaaccagttccatatctccactttctgtactagaacccaaagcacaccagatcgatcgatcccctcccaaaccccccacagcaaaattaaccactagccagccgatcagacaaacatcactacgctcatttcgatcaacccgaaaccacgagctagctggggaaattaaatccccaaatcgatcgatctgcgcttcagacatgaaaggcacaggaagaatgtaacacaaaccaattcgaataggagtggaactcgtacctttccagtatgtttggcaaacaaagcaacaacgccagagctgctggtgcgacacataatgtcgtcttggtattccaccatcaaatttccagacatttcctgataagtgggggacacttggagatgtagagccctggagtttccatcaacttgaacttggtcgaggtagtcctcgatgacctcgaagtccttgcgaatccaagtttgaacgccatctgggtggggcttgaggatctcctcgtcaggtagataagaaggtagtttcctgcgaaaatcgaaccaaaattagtgcaaacgggaggtagaacagaagcaaaacgacgcggcgcacggcgataaacaagccgaagcgggcgccggcgagaacgagaaggaaacttaggcgcgtgcgcggcgagaacgagcaaattaaggcaagcgcgcgcgcgcgcgcgcgacgagaacgagaacgaaacgaggaggtgtgttcgcagcgagaacgagccgaaaagcgagcgcgcggcggcggcggcgagaacgagctggacgcgtgcccgccgcggccgcgagaacagaacagcgtgcgcgcggcgagagcgggagagaacgaaaccttggcgcatgcgcggcgagaacgcgccaaaggcatgcgcgcgcgccgcgcgagaacgaagacgaaacgaggaggcgcgtgagcggcgagaacgaagctgagatgcgacgcggcgtgcccgcggcggcgcggcgagagcagaaacgagacgaaggcgcgcgcggcgagaacgaagacgaaacgaggaggcgccgtgcgcggcgagaacgaaactgagatgcgacgcggcgtgcccgcggcggcgcggcgagaaggagaacagaggcttggggcggcgcgggactcaccggagcttcaggtccgggttccacatggcgaccatgccgttctcgaggccgcccgcaatgagaccagcctggcacgagaagtcgttggacgcagatggcttcgctcagtcgatgctgcagaatccctccggcgacgggaacgaggccaccatctccagcatcttctcgcctgggcttgtacggaatatactcatcggcgtacgcggcgagatgccgttgtcctgaactacgccgccggcgaggagcgggacatcgccggcgaaggctatgacggaggtgggtattgccttggacttgaggaggaagacagccatggcggtggcgggcgtgatggattgcgtgtgcgagtcgctttctcggtcttattttatagctgtgtgagccgagccgctcggaaggacatcgtataccgtcggatccccagggagtccacgtgtcatccatccaaagcgtttccttgggcttagatgagccggtgcaaaatggaatcgtttggttgcctgtatcacgtgatgactggaatactagtagatgcaatgagaatatgttttggtacggagtatatggtttgagcaggttaggacatgaacttcaaaatcagttgttattgcctattactacttctcaacaattttcttctggtggtaattattcaaacgctctaaagaatttttgtcaagttaaattgctatccactacaactgattctggaaaagggacaagaatcaatacgtggtataaatttgtagggttaattagatacatgccattataaatttaacggatttgaaatatgccattacaatttgtgtggatttgaaatataccattacaatttatgtatttataacaatgcctttacaacttttatatagtttgaaacatgccgctagtatacatattttacccatattggacaaaaatgcccccgtcttcaacctctcgtcgttcatcatcgttgccacctcattgcctcgcaggcttcgggcttccctactccggcccccgtcgtcgctccgggaggacccgctccacgtggttgcaaccaccgccgccgcagccggaatctggaggccgtcggcttgccctctctgtcgcttgctgctacctccaccgccgccggaatctggaggccgccggctcgcccgatgtcatcgtccccaccttgccgccgccggatttgctcgccgggtgaagctcgtgccttccaccgccgtgaaccgccttcgctgacctcgtcgccgtcttatctgctccgcgcaaagctcgtgccagccgccaccgcgagccgccttcgctggtctcgccgccgccttatctcctcgcgagctcgtgtcgctacctcgcaggaggccgccgacggcgtgaggtggagggagacaaggacgtcgtgggtgaaagagcgccggagagggaggagacagcgactgcgatgtccatcaccggccgcacttgccactgctatagatggccatgtgggccgcctggcacggcacggcccaggcccggccgtgcctgggccgaggcttgtcgggccggcacggcccgaccgacgcaccgggccgtaccatgccagcccacgtgccgcactcacggcccaggcacggcccaacacgcctcgggccgtgccgggctggcccgaaggcacgacggcccatcgtgcttttcctcagaataagtctaattttcctccctcctattgggctgtgacatatatagctaaaaaagtatattttacctccctcttctttgggctgtgatatataaatagctaaataagtctatttaagatccctattctttggacaatgacatttatatgtctatttttagtccctatactttgtgtgccgggcctggtctgccggcccatcgtgctaggccgacccgaccgtgccgggccaacccgaccgggccagcccagcgtgtcggaggggaggcccaggtacggccgggccgtgcttgggccgggccaaaaagccatgccattagccgggccttcgggcctcgggccttatggccatctattgccactgccatcgccggtctcctggaatagaggagagggaagaaagaggaagaataaggaaagaagggcaatttggtcaaaaaattattgtaaatgcatctcaatggcatatctcgaatatgtgcaaaattataatagtatggatccaaatacacgaatactaatggcatatttcgaaatcggcatatttataatgtcatgttatctaattaacccaaatttgtaagaggcaaaacaattttcaactacgagttctagaaacaggttcaaggaagttttagggtacagcttgaatgattacagattcaatgtctcaaaagatagaattgcatactacttattcacaaagattgtttcaattttattaattgagacctacacatacaaaacttgtactattgtccaacaacatttaggttgcggtcgcaatatgctgcacacatccacgtacgtatacgtatacgtgtcgcaattgattacgtagcctgggcttctttaattatgtacagtgggttgggcttcttttattttattgcctgggctcgtttcatttttgtgggctggagttcatttattaaagctcggcctgacttgaagaatgtgatctcgagggatatcatctcgtttcgtgcatgtcatctaaatagttatcacaaaatttgcaacataaactaatataaaatatatcactccataaacatgcaagtttaaattcaacttatacaagttataacaaaataacaaatatagccgcgaatgtaccataactatttctagtttaatttgttttttttttcaacttgtatatcgcgctcgtcctccccgtcgtcgccgccgccccggcgaggagccgcccgcgcctctctccctctgcgatggtgagctactcatgtgttttactgtcctatgaaattattaggtagtagggtttatgagctttctggttgattcctggccaataattttatcaccgctagtcactccaaatcgtcgcatgcctctaggattctagtaccactgaaaacctaagtcgatttgcaagtaaaatgctaatatgttagtactgcattatcttaatgtaatctcccctgttcatattatgattatgaatttgtgattcattttcttggatgaacagatataaagaagctatcttctggagatgttcacttgtactgcaaagcatgctcagcaagattggcaaaacagccactaaggtagagcataacagactttgagttgtgaccgccggatcggtgccgacaccgccgtcgttggatccacccgcgacaagccgtcgacatcgcagttgccaccggatccgcccgttgaagccgcagaaggacgccttcgctcacggtgggggagggagccgccattactgcccatgcggagggagggcgccgccaccgtcgttcgcggaagggaaggacgccgccgccaccacccgtgctaagggagggcgccaccgctcacagtgggagagaagaggaatgaatctagggttagggtttcaacaaacaatgttttatctaaatcacggtgatcctagccattcgatcgaattcaatgactctcagcgcacttatgccgactttgtccgtggcctgtcacatgggcccagtgcacttaaaaggtggacacaacgtccttctaattgtgggcctaattgtgttttatttctttcatctgatttaaactatttttcaattaacaaacttagtttaagcactttttgaggcattaaaaattgctgaaatttgatatagtttttcattctttataataaattatttctagctagatggagtcaacgaaatgtaattatttctttgtcatgatatagaattagacatagatttaatttattatttatgtccaggagtatccaatatatataatttctatgaaactataaaataactataatcatcgtaacattagtttttcccatcgcaacgcacggacatcttttctagtccaatattgaaatctagcagctacaatgtatacatgagtatctcacagcaacatgtgaggtacggtgtcatctaatcctattataactcgatctacattctttgtgcatatttttgagacaaactctaagaaataaagcactaggtgatatgaatctgtattttaacgtacatgacgtgtgtgtgtatatatatatatatatatatatatatatatatatatatgtatgtatatgtgtgtgtgtgtgtgtgtgtgtagcaaccgggcacgccaagttggcaaacctaaggccatcgatcgcctagctcgcgccgcgatgaacgacgacgtggtgagcgagatcctcctgcggttaccggcgaaggccgtcctccgctcccgcgccgtctgccggacctggcgccgcatcaccaccgcctactcccgccgccgcccgcttcagctcctcggcaacacggaccccagttattactttacccccttcaacaccttgacctccctcccagccacggccgttccacgcatcgacgacggcggcgacatcgccggctgccggcgtttgctccaccgcgacagattctgcttgggcctggaggctacctgcgacggcttcttgctgttcagaagagtgcagaaggggagcatgctcatctgcaacccggcgacgcggcagctcgtcaatctgccgccggtgagccctgagccgtcgtcgcggccaaatgataacgagctgcgggcactgggcttctacttccaccggccgtccggcgagtaccgcgtgctgtgccaccgcccactcctagatgtagatgccacctacatcctctccaccggcgccgccgagccacggcggctcggcggcggccctgactaccaccgctgcaccatggtcgtcggcgagaccatcggcgacaccgtatactggtgccgcccccgttacctgcacaacggcaagccacagatatcgtcgttcgacacggtgtcggaggcgttccgcctgctgccgccgcctccggtgagcctcgccaaggacgaactggtcgccatgatcgacatgcgcggcacgccggccgtgtggacgatgaccgagctgcacctcgacgtctgggccttggaggaggaggagaggtgggtgcggcggctgcgggtggggatgcctccgccgcccgcgccactcgcctactggagcaagggcagcaggaagaacgccgtggccacgttcgagtccggcgacggcggcgtgcagatggtggtggtgacctgggcttggaagttgctgtacgacgacaccagcaaggacaggagggtggtgggtcgcactattgttccgagacactgtggacatttctggcacaccaattgttggtttcgtgcctaccgggagagcctcgtcagggtggaatcttgcacgccggacctcccgccggacggcgagccctatctacaattctgttgagtacaaacacgtcgttgctagctagtgatactatgattagtagtacttcctagtcctctgtgttttatagagtaattatataagttatttttgacttttttgtttttacaaacaagtccctagtgctagtgcttcgcctcgcgctatttttcgggccgtttctcgggtgcggcccagcccacgacaccgaaccgcaatcaccccctccttcgtttcgccgcggcagcgcggaccacaccactgctccccgctaccgccggcggctgctccgaccgccgccccagcgcacgccgccgccgatgtggaagagagttctggacatgacgaagaaggccaccgccgccgctaccgccgcaactggcccattcatatgcccacccagtgtcatgccatatgccttacacagagcccacatgcgccatgcgccatatgccccaccctcttagcacacgtccgtacgtccaatgacgtgctatatgctatgccaagtgcccgcatactaatccgtatgagcaaccgcgagggtcagctctgatactatttttagaaaaccaacacttatagtatatgtatatatacagatcggcacctatagtaccgatctgtgtatgtgtttttatagtagtgacatatcaacactaagatacatagccaatgcaaattcgttgagctacaaccttcaaaattattaccatagatgggctcatcaataatgctacagatcaacacgataatatggaattcgtatgatttacacaacagttcatatgtataaaatttggagatatttgcaaggtatgtacaaatttaatatttttgtgcacgtgttataagtacacaagcaatcttaaccatctatatttgtgatattcacccagtgcaacgctaagcatatttgctagtaaaataaaagtacttatagcatttctatgagcatgttcaaaggggctgaatctcaagtcagccctaaacccatccatgacatcaagggttgatgcatgagacacgcatacggccgcatattttacactgtcacccataatcacgtcaaaaacaacccatcgaatcaatcctcacctcctctcctctacgagcgcgcgactccacctcctgccgccgccgcgatttactcttaacaacgtcaaaactgcagaattgcagaatatacgcaggtcagctttcaaacttgagccgacaatcagaaaccaatgaaaacaaaatttcattatataaacgctaacaaaggtatatatgattatacaagattgtttcctaggcccactacaagaaaggaaaatgtttcctaggctacattagaagaaaaacaaatgctatcacacatgaaatcagattacaaaactttgcgccacatggctgattctactcacagttagcgcttttgatctctattcatatatatatacagggaaaaatggcatacattatcattgaaatatgaatctgaatcactttgttgtcttcccaaggcaaattatgagcaattgctgtacgccagcagattaagttactcgatccatatcatctttcatgatgatacttcatctcatcattctaagaaacctttgttttggtgggaaactatagatcgagacaatgggtctttacaaatagatatgactaacttctctaaaatcacagcttctgtttcttccaagatgatgacttagtgtcaaaaactatcacatttcttccatgtcgcttcctgatccaggacttagtgtcagatttatcaataggagctggatgctctccaacttcatggaatgttctcttctgcctaaccaagtccctgattcctgtcacatgaagatccttctgtccgctgacaacatggtaaacatgatctgctttcagagctccccgggaatattgtttctcaaaccttgcatcactgccattgctatgacccatatgcattcgcagtgactgattgccttcattccttgctgggcaaacagttgatttgcgattagctggaatgttcaaaggcaaagacctagaagcctctctatcaaagttattgcttagacttcttattgaagagtgcgtatgcctcataacagcgcccaaagagtgtgttatgtgctgattctccatcagagttggagttggcagtggcctgattatcggctgtctctccatcagagttggagttggtggtggcctgatcacctgctgtctctccatcagacttggagttggcggtggcctgatggcaggacccatggagcatgggtttcttcccataaatagctctgtcatttgttggataacagctgcaggtggaataaatcatcagcacgatggaaaatcgatggcactaattgaaaacaaatggcaatggtccgatttaaccctggaaaaaaggctaaaacttcatgaatccatattataaggattgtaccttgtaactgctttggagcaacatcaaactcatgccaccatacttttccatcagaaggaagtctaaaattattaaacttagcagcaaggtagagggaccctgctgctatgtagtgaggtttaaactgcacaaccaaagtagtccgaatcctgcataaacaggacagcagtaccaactcagaaacaacagagttgcaatttcaagaataaacaaataacaaggtgacgcaaagaacttacgcatcatttattagattcaccgcaacttgtttcacttccatctggaaaatgcccagcttcttgagagcgagctttagtggctcgtaaggatgctgtatgttgaaatcaaacctaattgttgaaagcaacagcgtctcccctaccaaaatgagctctttctgcttctcaagaacttcctgcttttagtaagaaaagttatgacaaagaagccggttatatagcaagagtatactaatagaaaaaatggaaagttttaagcaccttctggtagattctgtgagcagcgttacagtctttccggtacatggtttcatatgccacaatgatgacacgttgtaatgggcaaggtgtgtcttcaatcttcgaagcaagaaatacgcagacagttgcaacggtctggaataacagatagtaactatgatttacatgttcaatagtaaaaattgttaaataaacttgcgcatttgtgttagttagtaccatgggcccaaatctaggattaaatttcccatggctagaaataaataagcacctatattggaaaaggcaaatagcaataaagacaagttgttattacttactggtaaatagtactaatagaaagcattgccttcaagtttgataaagtcgctcccaagaatcacgtgtcttgcccaaaattgcaatttttggtgctccgagtaaaattgcttaaagctatacctcacttccagattcattacttaaatgggcgaacttcaagtcgaagtgaaaattttcaacgcttatatttcataaaagacccctcatgggaagtttttatcactccaacgaccagtacaccacataaggaatgatccaatcaacagtgctccaaatgattatacacatttacatcaaaccagcttgtatgtatccatatatccatgccggtgtaattttcttaacaacccacgtgactacactaccctcgactaaccccagaggatggtacatagtcaggtaatgttaggatccaacggataaaaataggaagttttaacttccgaaaacatctacacaagtaagaaatgaagttagttatacgacatggttaaaaaaagtaagtgttaacacctttaccctcaatggagtgcgtagagctttctagcccaagagtttttatggtggcaaatatagattgttttatacatagttatatttttgtggataggagcagtggcagagccacgttatgacctgcggggtcaactaaccccataatttctcatatttgcattgaaactgaaatatataatcttttgatacattctccgcagggttgggattttgatcctggatcggccattgcatctcagtgtgctacaggcacagaacatcgattgcagaaaacacgaaacagttggttaacggatgaaatggcaccactgatttttgctgatgcaaaagcgtttggtcactcgctgttggcaatggcagattagctttaattatcagtgtcactataacctcagaggaagattttcaacattggatagtgccacaactagtgggcaaacaaatgtgcgcatccgtatctgaagaactgcattttttttttacctgccactcgttcttggcgtgagactgtcggagataaaagcgatggcagagcaaggttgccgtcgcgattgtcacctgaggcctgcaaaaaataaaattaaattagcatctttcatcaggaaaaaaacccaaatccaacgcgcccccatcaacagcaaccaaccaacaacatataaatcactctcaacagatttaacgcgcacgccgcgtgcgagaatggatcgaattcgacaaccagatggaaaggaagaaagaagatcgatcttacagctgcagcctgaggccgacgtcgcggatgaaggagcagtaggtcgcccggagctcggcctccttggcggcgccgacgccgtccctcctcgacggcgaacccctctcgacctcatccctcgtgacgtaccacgaccccgccgcgccctcccccatcgccaccgatcacccaaaccaccacaagatcaaatccctcccccccccccccccaattctccaaatcggagcacgaatccttcgttgccaaggcttcgcgggatggaaaccgcgaggaggtggaggtggatggaggcgacgacttgggcgtggactctgatggcggcggcgggcggcgacttggccgccgcggcgaggaggggggttgggaggcggaggagggcgacgcggttgtgttttttttttctcctttttttttctttttctttcttttttttgttgttcgtttcgtggcgtgtggttgtgttctgttttttggtttgggttggggtttggctcgtgggacgcgtgcgttatttggcgtgggggtgacatgtggggcccgcgtggtgtggaagtcggtttcggtgtcgtggcgtggcgtggtgcggatattttggtatgggccgaattgagattgtaaggcccatattatggggtgcgtgtagggtgtgttgagttgggcttggagatgggttgggctgagaggatgttctgaagctctttgtgttttttttctttttcttttttttttgtgtgtgtgtggggtggggggagagaatttttccacataaaattccctatagtagatagtggagtatttgacatttaggggaaaaaaattcagtcgatttttaaaatattttttactggatggagtagaatatttttattttacttcatttcatttataaaaacagctgcctctatcctgttgcattgtactgacaactttgttgtgcacttgtgcaacacccaggaaggaaacaagagatagggatgacatgatttttcttttatgctgaatgtttttcgtgcaatgaaaaatgagcaataattgtttttcttttttgaaaggagggcaaaagctctgcctgtctgcctcaatgggcaataatagtggtacacgaacaaaactgtactgtgaggttaagaggaaacggtgttgtctgaaagctaaccagacgttaggttcaccttccatgcatccataatccatgccctaactacagataatcattagcccaactgttattattattattttttctacaaattatattcaaatcgaccaggcccaaaacggtgtgaacagcgagaagatcattagcgtcgcagatcgatctcaattggagtaccagattagattgcttacaaaaataccagcagagtattattaatgtcaacacggctaggtagccacaaaccttagctgtcttgaagtttaatcaagcgatgattgagctaagctagcttaattagctgcgttccatccgtcgtacggcggctcaccggccggccgccggatttggtccggtccagctcacctcacgcaccggacacgaacacggagcaagtcaacacagattaatgacgaggttgctagctaatcaaacaccaagagcttgttcactttacagccattttcaacgttttgtattaccaaaattttgattaattgataacattaacaagttttaataagattggctaaatatagtgttgtcaaattctccaatcatgaccaatattttggtaacaaactaaatatatcagttttagcaaacagtgatatggtttaaaatgatatgaatatgaagaagccccaaatgatgggctttgattgaccaactaatgcaaaaatccatcatctactttgattaatcaatccgtttaaaccactccagattttggtcttaactggcagcagattaattaggcactggttctgtactagtggtagttttgtacgtacggttcttgcattgcattataagtgaatggcctagctgatgagcctgttgtgcaattcttgactatttataattaactgctgacaaattggcaatttgttcgatcgtctgatttgagaaggtcaagaacgcagtgcagctggagtaattaacaagtagtataggcagtagtctgttttcgtttctgaaaagaatgttgacgagacttaacttgagccagcaacttagaatcataagagacggcgcgattaattgactgtcatgcatgtagttaatacacttaatcataccggtggtatctactcctactgatgttaaacatgtcttacaaacgaatcccaacctggtgagaagttctgccaagacagtactactgttcaaaatttgacagcaactcggagtagcaaattttgctcattgtgacaatatgacagtggtaagaactaggacttctttcgtccaatatttatatcaacatgaaaccgaatatgtcattatagtacaacgaatctaaaaaaatgtcatccagacttcaaattcattataggtactataaaatattctatcggattttaggttgctactatgttaaggattgaaggaactggtatgttcaaaattaattatttggttgtcatactttgccttgtcacactttagttatgccacaatttcttaagtatgtgtttgtttcactatcataattgtgtcataccacacttttttagccttagaacccacatactccctccgtcccataaaaaaccatcatagtactacgaatctggacatacttctgtccataatcgttgtactagaatatgtcacatccaattctaaatttgttttttcggaactgagagagtatcatactcttaaatttggagctaagcatgccatatttatggaccgtggccaactatttctaagccacatatgtgccgccatatctcaaactaactaaacttaatgatgaccaaccaaacattcccctaaatgcgaagccaattaggattaaaacaaaatggtgacaattaggggcatgccaatgcacgaaacagtggcgctactggagcgccacgttctgagccgcagaggcattgcttgcttccttgccttttgcgtgttaactcctagtactactgctgccagcctcgtgctgcagctgccatctgctacctgtatcctgcatttcttgcccctcattgaccatccaatccaacttcatcattcatttcccatcgcatcttcacatgcttcttctcgagtgcctcgagatgcgtgccccgcccaccagcagttgcacagtagcagccgcagagaatcccaggcaggtcacggctactagctgtaactaacggccggctacagggcgagcagcgtctgcggtcgcgccactgacaggtggggcatacgtgccaccggggcccacctgtcagtgacgcagatagggttcttccgctggctgtacccctccgacagaatggacgtgctgttgctgctagtattaccttttgcgttttactccttctaccatggtggctgccatcatggtagaaaccgtacttgctgttctgtcagcccaattgtttactcggttatttgtggaataagccatacggtatactatttataaacaaaaaataatttataaataatatatatatatgtgtgtgtgtgtttttagtgatataaaaataaatgctgaaaaataaattttgataaaaaccttcaaaatcagctataaatttaaggttgaaaaaataaattttagctaataagtataaacataatcgtaaagatgagactgtgtattggacggaattaggatagttcagattcacggtaccggatgtgttaaggtttataattttttttgacggaggaggaagtatatgtgagtgtaaataatgataactatgaggggtacatgaaaaaatgtaactagtcctaggcgcgggcgggccggggcctggagagtgggtcccatggttggcgctccccgcgggcgcgccacgtgcggcaacagccaggtggggcctacctacctctccgcaccgttgctgaattttttggtttttcttttttctctgtatccgctccaattcccacctaaaatttggccgggtcaaaactccggagtccaatatggggggatatttttttttcgctgcgaagtctgggtggattttgtttacatctagacccttatgagagtgtgaaattacttgaacgcaacgatggtcttattccttttataaattatctattttccctttttcttattatgttcatggttatatagatgcatctttcttcgaaggctgggtggatacatctgagaaagagctagtagtatgtgagaaaagctaatcacatactaaacgcgtacctgtgttgttttttaaacaacaatggcatgcaatagagtggtgttacgtcgtcatttgtctaaaaaagacattgttttctggagaaagaaaagggcattgcgttatattatatagaaaagaaaaagacactgccttcttactttatctggcatgtaaagatgtataaaatcacacggcataattaaaaaggttttcgctcatctatcctctttcatctctctcactttgcagttaagtattatccatcttgtttccaatgatcatctacgattcctcactgtctcaatctcattcttgaacaaaatacgagtaataaaattatgggagagagtaaagtagattagaagaatattagtgttgcatccaataaagcaatacgcattctgcaatttgctttcaacaaaatcatgtacttaaatttttatctaaaaacatccttttacaaaaagaaacttatacaactacatctaataaagcctcttttttcaccctaaagcaacccggccgtcactaaggaccgttttagcttttcggacgattagtcacttagcttcatggagaaggcacttaattaagacatgattgtattaaagattaaaaacttgaaaaaaagtagatctattcaaaaattttaagaaaaatatccctacatagttttattttaaaaaattacaaggtttatgcccatgataatctagcggttatattctgaaaagaactaggcctaagaatgagaatctcatgttggttattgctcgacaaatcctagtgcaatatcaaagtagaagagtatcactttatgccaaaaacttcaaagattcacgctctttttcacacgccatgttctttgtcctaagctctaatatatttgcttgtcgtcattcaatgcatttatcacaaacataagcagcatatagcaagaatatttatctaatgctataatactaatataataaccactactatcccaaatttattccaacccaaacaacccatgactctattgatattgcatgaactcaattatatgatattcataacttgccacataaacatcaatgtatacatggttaacgttgatagttatcacgaaaaaccactttgtttcacaaaaccgtcggcagctggtttgtaacatgttttagctgatttttatacggagttcatcagaagtccttgaatatttttgttcggttttgtttggttctcaggtagagcgatttttactcccaaactggtaatcttttcatacatatttttcatggtcttatcaggctttcaacaaaccaacaaagaatgggttttactcccaaaacggcaaaggttaccgaaaatccttgcttttttttttagttttgggtaaacagatatagaacgggtttttactccaagacggttagctaaacccccaccgtacccaacgcctccatcgccacaaatatcagccaacccagggaggacgcgaacgcaaattcccagaaacccgaggggctgaaacggaagcgaatccgaaaccacacaagccgaagcgaagcgcgcaccgaattcccggaggaatcggcatcggctgctcctccttccttcttccacctcgtcgacgtcgcctccttcctcccatcttttccattactttaaagttacctccactactttacctccccactcctctcccccaccacccacccgcctccctctccctctctctcttcttcctcctccgcgacgcctctccccaaaaaattcccctccccgaccgcctcgcctcggattcgattcccgcgccgccgcttcgccggcgccgacgacgacgaccgaccgaggtgggtacatcatcggggggcgagatctccgcggtgctcgaggtagccgcggtggtgagttttttgtttttttgtggggtggagggggctagggtttctgacggggaatgcgggttgcgttgcaggatccggaggtttgggagaggaggaggaggaggaggaggaggctgtgcttgttcgtccgacgacgtccatgtcggggcatctcgatcgcctcgcgcggccatgtgagttggggattttgatttttctctccgttctgttttttggggttttttttgctcgatttttttttcctgggagatttgattgctggggggttatgagattggattggattggctgcattgggatgtctcgccgtgaggattggcctgcactggcgccgcgttagaacccggattaatcacagagactagattagatttaggatttaggcgaatcaagctcgctgcgagttctctcgcttccgtgtgttctggtttggaataagttagggcttagtatccatcgagtcgtaggacggtttgcgtccagtctatgtgtggttcgagtttgaccggttcaatattgtgctgttctggtcttgttgaaggttccatgttctctggttttgatggacgcgtagctcccagaatgtgagtggccaggctaggttggatgctttgacttgtgaagcataaaattcacgggggactttcggtttggtgctggatttttctgtgacaggaaactaacttactatataggcttcaacttgattgaagggagaaaatgtttttgatacaaggagaaggtttcatgtcgatttccgcatagaacactgcattgaccagttcaataacctcaagctccgcacaatcttaaattcatgaattctgaatctggttgactagatggccagaaatttcaacgcagcgtacactaaaagtcacaattaagaacacatatatcatgttgggtaggattttgatgttcatcatcttataaaaaagaattgaataaatcctttttaggtagaaacttgtattgtttgggtatagttgttgacaaaagttacataacatttgttgacaaaagttgacaaaatttccagctgtaaccatttggatacataaggttgttagtattgaattatctagttgtgtaactaagctagtttggtggattcattgttgtgaacaaagctattccaatgcttagattgctgaaaaattgacatcaccttgtcttcttgctagcatgaagagtttagacaaacttaattttatatcttaaataagttgagcggttgtcaaagtttatttatttatttatgtacaagtagctaattgttgtaaatttgcacgattaccgagatttttttccttttctttcttttttggatgtggtggggcatgagcagttcttttgtttagaatgtttagaaatatcaccctttatctgcattctaaaatttccaatgatccaggttttgaagggtcttcaagtaatgatgacaagagagatcacaagtcagacgttgaaaattctgaagatgacaagagaacaagaatgggttctctgaagaaaaaagctatagatgcatcaaccaaaattaggcattccttgaaaaagaagaagaggaggagcggcagtcgggtcctctccgtgtctattgaagatgtgcgtgatctagaggagctgcaagcagttgaagcatttagacaagcactgattttggatgagttgttgcctgcaaggcatgatgactatcatatgatgctgaggtatatataccctattacttaccatcatttttttaacccaactgcaaacatgctgatgacttgactaattgatttgtgtagatttctaaaagcaaggagatttgacattgagaaagcaaagcaaatgtggactgacatgcttaaatggaggaaggagtacggtacagatacaattgttgaggttagtgttcttgcttgtgcctataaaacaatttggattttgtttggctataaataatgcctgtaactacatttctctgtaggattttgattacaatgagttagacgctgttctgcaatattatcctcacggttatcatggagttgacaaagacgggagacctgtttatattgaaaggcttggaaaggttgaccccaataagcttatgcatgtaacaacaatggaccgatatgtaagataccatgtgaaggaatttgaacggagcttcttgatcaagttcccagcatgctctcttgctgcaaaaaggcacattgattcgagcacaacaattcttgatgttcagggtgtggtatgctgctgaagctttaatctccagactgattattctttcttttttttcttttcactcaggcatgtgctaattgagcacattcttttcagggtttgaaaaatttcagcaaaactgcacgtgaattaattgtccgattgcaaaaaattgataatgataactacccagaggtactgtcttctactcaattcgctgataagcacagtactgtgttaattttcttgctaacttttttttcgtggttttatgtgttcagaccctatatcaaatgtttattgtcaatgctggtccggggtttcggctcttatggaacactgtgaagtcctttctggacccaaaaaccacttccaagatacatgtaagtctttattcttactacacttcaacttttgcatgggaaagatacttagtgcctaaggtaattatatatttcttcaggtactcgggaacaaatatcaaagcaagctgctagaagtaattgatgctaggtaagtaatgttcaatgtactcttgttgggacactctttttgtttgttcttcattttctttaatgttccttccattttaataaattaatcagtgaattgccggaattccttggtggcgcttgtacctgtcctgaatatggagggtgtcttaaagctgaaaaaggaccatggaaggaccaaaacatactcaatgtacgtttgatttcttccttactgtttgtctattcattatcagtgcattgctttctatacccttcctcatatgttttaataattttttttatactgataccagatagtccttagtggcgaggctcagtgtgctcgacaaattgtaactgtttccaatggagaggaaaagataatttcttatgccaagtccaagcaccacacagtatgtctcacaactcagtactatttttctattgctttctttgccttgtgctctatgcagaaacctaaatcttgctttattctggattgctagatacgagggagcgatacatccactgctgagtctggatctgaggctgaagatgttacgtctccaaaagtactgagaagttacatctcccatcctaagttgacccctgtccgtgaagaggttggtagttttagttttgttatccagaactgtttcttggttgcaagaatatattctacagtaccgtctgttgtttccttcctccctatgcctatttgttgagagcagggaaggaggcggggcacattaaaactaaaatataacttatgtttctttgttgttttacataaataatttcatctattttatagaaagtgcaaactaagcagtactgaagtgaactagtgatgctggcttgcatcctcttatgttacaaaataaatgctttctcctttaagctctgttattatggattatgccacttaaattaaatcatttccttcttcaggtcaagatggttagagccacgagcttttctactcgcatgcctgaatacgatgttcctgtcgtcgataaggctgtagatgcaacatggaagagagaagtgactcgaaagactgccttctcatccaaaggtttgttggtaatataattgtaagatctgaaatttacctttggttgctgccaaaacctgatgattccctctcttcaatatagactcttctttgacaagcacagaaagttcatccaatggctctttggaccggatcgttgcagttttgctggcagtttttatggcaatcattactttagttcggtcagttaaagatcttgctgcaaagagattgccagataaaaacgagtcagaacagaagtattcaacattatatccagactcgatgccaaaagaggaattccgaccaccttccccaactcctgggtttgttgaagctgaactattttcgtcagtcttgcaaaggctgggagatcttgaagagaagttcctgatgcttcaagataagccttcagagatgccctgcgagaaagaagagttgcttaatgctgctgtccgccgtgtggatgcgctggaagctgaacttattgtaacaaagaaggtaaacaattctgaactgcgaaactttacattatagtatcgtttatcactactttattagggtatgtgaaacatgtcagctgatcatttgcaaaaattttctcaaggccctacatgaggctcttatcaggcaagaggaactactagcctacatcgacagtaaggaggttgccaaggctcagaaaaagaagaaggcgatgttttgctattagcaccagccaaccaggagagggtacaccccctatcttgggattatactttctgacagccaaagacggcgtttgagaattgagatgttgtaatcggcagccccccctgctcgcttccctggttctcctgtaaaatgtgaaacgacagacgtcggatgtaaatcggcaaaattctgacataaataaatgtgtttttttgcaccgagttcttccctgatcccttcccatcgctgcaacttgtgcaaattccctgtgtcatgtgcttgcaagaattattcggcgcctttcgtgttatttcctgcttcctccgtttctattgtagagtttatcctaagcaacacctctccaagtttgtcaagttcatagaaaaaataagttatttaaccagagttctcagctttcataacttaggcgaggagttttaatttgcaagcatattagctgtaagaaaaattctgaagaaaatagatatatacagcctgtacatgtaatatgtttgataaagcacgtgcagcacaacagtggggtacacagttcagtccagtaagcaagaaaaagtttgttttttttccttttgctatacacatataaggccccttttgaaacacaagaagtatgtaacatgaatttcacagaaatcccggaggaaacaactcaactcaactcccgcagaaatagcaaaattttttccgcatttcaaacggggtcagatacagcgacgacgacgcacacaaaacaacacacgagacgcacgaccgagctccatcaccgcttcttgctttaaacccgtccatcaccagcggaatggattctgctgttgaaggcaaaactttaatggaatcagatgatgaaacgagtcaatgagttcttccaaaacgtaatcaagcctatataataagatgaagatcatccaacggaaaagaaaagcaggagccccttaccatccccctcttcttcttcttcttctcgatgtaggccagcacctcctcctgctgccccgacgaagtctccaaaagctgcaaccaaccatggactctcacttgtcagcgacctagcttcttggccatggcaacggcaatggcgagtgtaattatttttagtcaattgcaatttaggttatctatattgttgaagtttcaatttaaactacccttaaatcatctttttttttatttggaccaccccatataatttctcaaacactcgtccatcaacaacctcaatcaaatcggtctcgatacaccattaaacttctccatctatatgtatattatatcttcaccagaacggagggtaggtatgaatagtgaagagaattgtgtggtttaaactgaaaagtagcaaatttaccgagtacaaactgaaaaaaaaaatcggtttaaggatgatataaagtgaaacattgataataaaaagtgacacaaactacaatttactctttgtttaattaccttcttggtggattcgagctcggtctcgagggcctcgacgcgggtgacggcggctttgagcaagtcctccttgtcggcgggcatctcgggagggcgggaggtgagcgccgccaccttctcctcgaggtcgccgagccgcttgatcagcgcttcgtactgcgccgtcgacaccgtcaccgtgtccgggccagggagctgctccagctgccgctgctgctgctgcatcagcttccggttcttggccatcgcctccatcgtcgcgatgcccatcgccgcgtccatggcgcgcttcggcgcgatcttccccacccggaacatcgccaccacccccatcacgaacgccatgaaccccgtcaccacctgccggtccccggcgtcgccgtgcttgtacgcgtccggcagcgacgcgtacatgtctgcattgcatccaccatcaattatgtcagtgacatttggagagacgtctagggatattccggttagcttcacaaggtggtcggttagcctgaccggtctgggttcgaaggctcacctcttctatttatttgatattaggtccttcataatattcgcgttttatatcagtgacatttgtaacacacacacacaatttgaaactgaaattgcaataaaaatttcaacctcgtgcgagtgcgagcttctcggcgctgacttcgccgttccagttgaagtccatgttcttgtccggcatggggaacagatcgtcgtatcgggaagagcttccctcttggccaggaggagcctgcagttaattttctttctctgtcagttcatcagaaagggagatgccacattaggctaaccaagttgcagattggttgtttgcactgggataccatgattgaaaacagaagtaaaattcaccagcaaatttttgaattttggatgattaaattgtggcatgtgaattatgaacaaagtctgcaatcataaactcgtgtctatttaccttgctttctgaagttgacatctcatggagtggtgacatctgcggatgttcaatcttttcgcgtgggatcttgggtgaatcaacggaatcacggcgaattgattcttgcttctgcatatcaaaacacacaaaaaaatgattcagaaatgttacgatgcacaaaaacgagcataaaaaaaacttaatgatagcaattagcaaaactaacgataccttgggaattgccactatgtcatcctcagtgatcatcttctcatcagcctcagtatgacccgagctattaaatccacatcttcccatgccacattggaccatctgaaaaatcagatgaagcatcagaaccaaatcagaaatgttcataacttcatatatagacagcactagggctgagcagttcagttcatggcaaatctccactagctacttagctagcacatgtaagatgcatatatgcactataattttcagataacctttatgatttcaggatctttccatggccctttgtcggagcgcatgcagccgccttcgcaggtgcaagtgccaccaaggaactcaggcaattcgctgtctcgaaataacagggagtgagctcaacacgctgctcaatcttgttctttttaataatgatattagcagatttaatataaatattcaaggtgattccatttgcatttgcatagaagcaggaacgaacaactctagaaggttcatgctcagacctgggatcaatcacttccagcagcttgctctggtacttgttgcctaggacctggttaaaacagggcacataaatgcaaacattatgtaatgtttagttgcaaattgatcaaatgtagcttaattacgaatgatcgatgtgacattgacatcgaaaagattgtggatggattggattacatggatcttggctgtggtcttgggatcgaggaaggacttgacggtgttccagagaagcctgaatccttgaccggcgttgatgatgaacatccggcacagagtctgcatcaatacagacagcaacagatcaacgagtgaacgaacatttggaatcataaacatcgatgaacaaaccaaaatgtccacatttagattcattcagacatcaattaaccgatcaaagagcacacattcggattaaaaatacatcaataaccaatcaaagaacaaacgttcggattaaaaaaaacatcagttaaccaaatctaatactgaacattcagatattcaggcaccaattaaccaatcaaagactgaacatattcagaccaattaaaatcaaatgtggtcattcagattcagatactaccaattaaaaacaaccaaagagtgaacattcagattcagagagagccaatttctgctagctacctctgggtagttgtcaccatcgaccttctggaggcggccgatgagatccctggcggccttgttgaagttcttgtacccctatatcaaccaatcacaattaatattaatggatgtgaagaaggggaaagtgaaatcatcactcaatgagatatctacttgtttcgtgcatgttagtcataagttagattaatatgaaataaattacctcacaaacatgcaagtcaaaattcaacttctacaaattgtaacaaaaataacaaatatatacgcgaatgcacgataactattttcactttaatttgttctttttgttgcaacttgtagaagtcgaatttgatcttgcatgtttgtgaagtgatatatttcatattaatctatgttattattttttttcaaactttttgataactatttagatgttatgtaaataacaagatgatatcccctcgagggatgaaaatccacgtccaagaagaaggcaagaagaagaagaaagaagaggaggaggaggaggaggaggaggcatacaacgccggagacgtcgaggatggtggtgctctggtcgacatggcgcttggcggcgatggagcaggcggggaacttgacggcgaaggcgcgctcgaactcgcggacatggtacttgacgtagcggtccatgctggtgacctggaggagcttggcggtgtcgatcgcgccgagcttctcgatgtagacggggcggccgtcgcggtcgacgccatggtggccctgcgggtagtgctcgagcacctggtccatctcctcgaactggaagtcgtcgaggatggtgtcagatccgaactccttgcgccattgcagcatgtcgctccacatctgcttgctcttgtcgatgtcgaacttgcgggcgcggaggaagcggagcatcatgtggtagtcgtcgtggcgcgccgggaggagctcctccagcaccagcgtctgccggaacgcgtccaccgacttcatctcctccgcgtcgcgcacgtcctcgatcgacaccgacatcaccttgctgctccgctgccgcgccgccgcccccttgctgctcctgctcagcgacgtccggagcagcttcgacgacgcgctcatcgcgcgctgccgcagcgacgacgacgacgacgacagcgcccgcgcccgccgctcgtcctcgccgccacctccctctgccgccgccgccgcggccgctgcgccggcggatgaggagttcatgctcggcgtcggcatcacggcggctgacgacatcgccgctcgccgctcgccttattaataatcaatttcctaaattattcgccgcgccgagcccgagggcctcctgcatccaaaattccaaacaaacacacaaaaatcaaaacctcctcagcaatggctcgccgcgagatcaaatcatctcgtcgatgcgtacctcggattggacgagcggccttgggaggtggagccaggagggggaaggggatggaggaggaagaagaagcgagggcgatggcgatggcatgccagagttggttgctgcatgcatgggcatgggcatggccatggctgggctctgaatctgcatagctgacgtcatctcccccactatttccgccacaatagtagctgcaccgctattccttctcctccatgttactaacccagcagcaaccctctcttaactttaaactactcttactctcttttctaatgcaattatgcatttatatgcgcatgctaatgccattttttcaataatgaaaatcagcaaccatgtctctttaactttttgaaagtgttaactactcttcctctcttctctaatgcaattatgcatttatatgcgcatgctagtgccatatttttttaaaaaaataatgaaaatcatcccggctttgcttcatttttttttgagaattacacagtaaaacgcagacgctcacaacgcacgcatactcacccatatgaacgcacgcacgcatactcaaccatatgaacgcacgcacgcaaaccctaccttctatgagcatctttgaagattgggccggcaaatacttgagagatcgacgaagtcaccacaggcgcctcgctgtcgacgggtacgtcgcctaccactgaaagcacaacgacgttaaatcccgtctttgcttcattgaagctacaaacaattattataaagtttttataggtcgaaagaccgtgaattaaaaattatagctcgatggatataacactagaactacaggacggtttttgattgattttttgcaacttatacatgattaggaatatgatttttgcagactttgtgtgctccctccatgagtcatgatttattctggagatttttaagatgttcaagacatgtcatcatggtaattgaaactgaaattcaatccagttttgttatgttaatgtatcagttggcgatgttttgataatgccccggtgtctggtgaacggtgaccaacatttggtaaaactcgtccatacagggcagatgaaatagaggccaaatgtgcgatggccgaacatacacgggcaactttgagctgaaggcaagcaagatacaaggaattattacatcttttgatctagcaattgacagaagactgcagccggctgaaatagcaaccaacgtcacatggatcaaacggctgaagtacagattcacaaacaattttacagctcatcagcatgtaaacttggatcaaagcccaggatttctgcaaggcagcacataaaaattcaactccgcagtacagctaggctagacaataaattcccattggtagtaagcggtaggttataatgtatacaagaataaatagcgatgttacaaccacgtcgccgatgcatgtaccactgaatacatgtgctatcctaaacagaacataatgataacacaatctacccatcagctgaaacttacaagtccaaaggctaactacatattcacaactagtacaattatccaaccatggaaatagaacatccaggcaaagccagatttcagcctgcttccactacctctacgttagcatctgcctgcagcacaccactggcaaaagcgcatttagtctcagctagcgttgtgtgtctggtcatgctcaatgaagtccagagcttgctcctttgacaccacattgatgtagctaaccctgttcttgtgcgtcacaccatagatcttatcagcaacttttgcaatttctggtcggaatgtcgttgctataaactgagtgtcagccatgtcagctagacggcggatcatatctggagcattagcttaaggaaaaacacatgcaaaagcttgtagcattccaaagatgataacaaacagatggacattatttgatagcacgcaagaaaacgagagggagggaactcagaagaaatataaaggatactgccgacagctgttctgtactgtggatccagagcagcatcgatctcatcaaacagatagaatggggctggatcacaacgctgaatggcaaaaatcagtgtcaatgccaccactgtcttctgtccaccagacaactgtttcatagactgtgtttctcccttgccagtaaaggaaacctgaaacgtgagtgtaccgcttttagaagcttcgacaaagattatgcataatatcaagatcggtataatccaaaatgagtataacaacttagtatcattatttatcatcgtccgatttttcaaagatctattgacatttgctcaatgaacagtatatatgcacaaatacataaaaagcatatgcaaaaagagcataccttgacttttacaccaatgtacttctcaattctcccttcaggatctggttcacgaggcccatcctcatcattatcatcatcatctgcatcaccatcctatcagggaggaaagcataagcattaattttcagaagagatcttaccttcgagacatcaatacatggaaggaaaattcagataactccaggcatatacataggtcataaaatcgaagttcaaaattcaaaaatgtgtcatcttgaattggaaatcaaacttaacatcatctttgcattgaagaatagcccaggtatacaaaacaaaagatacgatctaatgccaattcatggaaagcaacataggtaacagtaataactaatagcagcctgtagtccccagcaaattggagtacactagacatgaaacccaattcaaccaaggtgataggccagcgtaggagaattacaattttaccacaaccaaagagtacatacacactgaataccagggctaaaaggcaaaaagtgtgtgccatggaagcaaggtcggtaggtaaagcaaggaaaatattacctttttcctcatcataaccaaatgtccatggccaccttgcactagttcagagaacacttcacggaagtgccttgcaacacctttaaatgtacgttcgattgattcgtccttcctttggtctaaaactgatattagttctctgattttctgcaatgttattcagcaggttttatgagattctactcataggatacaagcgaaactaaaggcttttaaccaatggaaaatttcacctgatcaccagcatcaagttcagcccgtcttctctgtagttgttcacgttgttcggtgaagttaacatactggtcaagagcttttttgttgacatgactgaactgctgcaattgctcattgcagtcataaagcatcttctgcagctgcttcttatttttccgcttgtacctatagcattggccagacaaataagttaaaatggtattacagcgccacaaaattaatctgcagaataccgctaaacaaaaggtatgcattctggccaattcagccagttttacatggaaacaaaaccaggtagccataaaatacagtacgtttcaaaagcatctgcaggcaatgagcccaagtctcggatcttcttcatacactcctcttgcttagctaaatgcatgctcctgctgctcatgagctgttccaaatccttggcaccatcttgtacggtctgctccaggttagcttctagtgcctgtgtttaaagataagccattacataagaagtcaacaacaaatagggagttcttacaaatagttcatagctatgttcaacttaccttcagatcatctctctgtcttttcagttcctccatcttccttgtgaagttattaatagcatcgacattagctatccaaaagatcatttaggttagacttgcttcactgcttaagaagcataagcatatgcagaaagaaaataaaagtctatcaatgtgtctatacccttcaacattgcagtcaattcatcaagactcctcttcgaactttttagttcttgctctttcgattcagcttcaagaggcaaggtcttagagtctgcagatgaaattattgcttcaagctctttctggcgcctcataagattagttgatagattggtttccagttcttctttccttgtttcaatctacataataatttatagctgcattagagtttgcagaaagaatcgcccgaaacagaagcatgatacaaaatttgctggaacaacctcgatgcgactgtttttacataagagaaacttctcctttagttcagtaatttcagggttcaatcgtgaaagaagatctcgttcttctgaagttaactgatcaataagttcagtgcccatttcatcatttttcattgcaatgccagattggatttgctcaatttggttccggatgttgtcaagtgatttttcctgcaagatagaaactatcagatagagttgcaggactatagcaacataggcatttgatacacagctaatgactttcatattaaatatcaagatagtgaatctcccatgaactgcagtaaaagaaaaggagaaccaagtaccttctttccaagtgccttgtcaagtgataccatttgcttcatagcgctagcgatgtcaaccttaaattgttccaactctgatttggcatggtcacgctcagcatccatttgctgctgtttggtaactaaatctgtaattttcttatctatatgtatggaaagttaaggaaaaaaattgaaggacatataaaattcatctggcataaatagtaaacagcaactcagcaagagccttgagatgccaaatacatatattcaaactactttggaacttggagccaaacaaaacaaacaaacacaaaggaagccatgaactttgataaaattgagaatgggagatttgccatcttgtttcacaaacatgtgactccttgttgcacatgtcatagccacatcaatggcaaatccttgttgccaactattgacagtgactaatccctaaatctgctagttgataggcccaatatgttgaagaaccagtagcattcctaccattttggaagaggttacatgcacgaatgctagatcactacataagattctacaagtatcaaatctacatgatgtgcatgcttatctctaacaattagaagagtggcagaatgagctacggtgcaagcaggaaatattgaatttaatagaaaaccataaactccttatccatcaggtctttagtaagcaggacaagaagtatatctagcagaagtaggtgataacaggatgaaacacacagttgtgtaccggtctcatgtaaacagggagaaatgagtgtagactaaaggatatctcttagcttgcttcccacattctctagatgtgctgcctttttctcaattgcagttttattgtccctaattattttcacaaacttcagttttgagcgtctagagtcatagaaacctcctgtcatgccaccttttctggcaacttgatcacctggaaacatcgactctttatcagtattaaattattaattaatgttaacaatgacaactcaagtgaaaaagttcaagactaccatcaagtgtgatgcaatccagcccattgccgcgtgcaactttggtcgcagtttccaggtctcggcatattactgttctgccaaaaacctaacagaaatataaaagttaagacacaaatatatattacaacggaaggggtgctacttaatctggcccacatataagcatatagcagaaaaaagaccattccaaaaggctgcactaaaagtaaagaaaagtcccacgcaaacatgcgctcttgactccatgcacatataaatacatgggaaggaaaggagatgagcagtgtatgccaaaacataagttacagaagttcataatcatggcccacctagaaaagtaatacattactctcaagattagtttgtgctaaaatacagcgtatgcaagaactgaaagtctggtaggtttgattcatagacataatacaaaacagggtaaaatataatacaacataagatggtctgtcatggctgatgaagcaaagctgggtgtaaaacctccaagcaggcaagggtaagaaaagtatatgcagaactgtagcatgagtaagccagactttgtcatgcaggtgaaaggcaagattgactgacggaaaacctcaattacattaatgaaggtacccaataaaatatgcagagaccaactgaaagaagataacagaagaacgtggacaatacctgttcaaaggcacggcgatgatcggcccgatattttagtttcttcaacaatggaacgaaatcgggactttgggggcaactaacatctggaactttcactctattcagtggtataaaagtcacccgcccacctttttctcgagtcaatacttgaatgattcttgttgatatatcgtcattctcaacaaccacatggaacaaactatttgcaacaaaatagaatggatgtaaagaacaatgaaatagtttaaaaataatctgtaccaatgtcatctatctaaatggcagtttaattcaagacctgttccctgcagtgacctcaacagcagtgaagaacttctcttcacaatcaaccagctctaaaacaggaccaaaaactcctgtaataccatggtccctgatgattctgctaacagaattcaagcctcttctgatatcctgagaaaggaaaagaacaacaacatgcagagatagttcaaccattgttctgacagaaaaatcatgtaatatggcaatagtggcaaagctcaatgtttataggcctatatccttgcattaacagtcaggccaagcacaagcaacattatcagtaaaactctaagaaaagattgatcgaattatcaagaaaattcaaaatcaaactactactaataaatctcaaattttatttacgattttgtcctgctaaggaatagtttgctgatgcttatgtaaggtgcatcagaatcaccatggtaatcctcagaacagtacatagcagtcagttatatgattaacaaaaggtataaaacatggaattttcataccccaggtgttgcatggtccaaactcttttgtgccttcacaagatcatcctttagcctatcaatttcagctgtcacatcagcttcctccttccaaaatgatctggaacattttccttctttaagtatctaatctatagagtaatagatcttccatcaaacaagaaggctgaaatatacatacttcctttcttcttgaagctcatctctctgcttcctcaagtcattgtagtcattgtgtttctttgctagtgcagactctaatttgcttgattcacttttccgggactcaatgtagctattcaagttattgatttcatctttaagcttctggatttcttcttgaagtaaaccttcctagaatagttgcaaggtaggtcagatatatatccacaaatagcacaatgattattaaaaaataacatgatagttcacattaagttaaaaataaatcttaacataaaaggggatgtattaaccaagctaaaacataatataatatagtttatgaaatgacgcatgtagaagaaaaaagcgtaatataaaatagtaaatgaaaacagaggtccagaatgtcaatataaaattgcaagaatcaaactggccactgaaataaactcttatctcttacctgctttcgatttgataaaagcacacgctcaagatcatcaatttccttttgaagccacttatctctggcagctttgtttgcgaattgggttgccctcccctgcttttggtacaatatacttaaccgcttctcacggtccattatgctatccccacaaaatgaaaacgtcaaacggagtaaacataaaaacataataaaattaatcaaaaacatatttttacctttttgatatttcttcctcttcctttaatttggcttgatgcaccttactaatttcagctaattcggactttgacttttcactctccatcctcacgctttgtaaatccttcgcagcttcatcctagcagtagattcttttaagtttggcaatcaaactgaattagcaaaaagttcatgagaaatatcaaatatgaaccataacatacctttgcccgtttctcgttcaagattctgtcttttatgtctctcaaatcaagctcaatctgagcaactaccttcagtgcttctgtacgcttcttctctacaccttccttttgagccttggtatcatttatccccttagttgagtattttatttctttgtcaaaagtcttcaccttctcacgtacatctaccacttcattatccgcatgggacattctttcagaaatttttcttcggttatcatccatctaacaataggagaaatcaaagcaggcagtaaaacaattggaccattcaatataaagatgaaacatgagctcatcgttctctcattttcaccaactgatgaagaaataaataactttttaactgctgcacaggtactgagtagtagtgttagtggtacagcgggtaattacagattaagccgtaaataatgtgatttttttgtctgatgcggaagagcaaaattccatatctcaatgcagttcctataatgtaaatatggtggttgcattgagggaggaccttaattcaaaagttattttccatcaggacagaagaacaccaaaaaataatactttgacttcaatacgaaatgctaaacttaatggtttgttctgcaaacttgtccaaaggcccttgttctttttttttttagttgaactaatccaactagcatggcaggaaaaatgtatccagaaagtaagcatacacaacaaaaaatggtaaatcataccgaagctaattcgttcctagcctcatttagttcatggtccagtatggtatactcaagtgatcttctttgtttgtccagctgctggtacttcttcagttcttctttctcttcatcaagttctctcaacctttcctccaagtagtggacaacttgatcaatctgctttcttttgttggctgttaataatgcatgaatgaatgtccactcacaagaggtctcccctagaaatatataaaaatttacgataacttaaacttgcctgtttcctgcatgattttcaaactctcgcgtcgtctatcttcataaacgcgcgtaccaccgatctctttgaggagatccagccgttcggaatctttcattagggtaagggatgcaatctacaaataacaattttcattacattatggccgaacagatcatgggaacaataaggtgaataattattacctttccctgctggacaacgtagtatggattagagcgagaaaatccagcactctctagcagattcatgacttcagttttactgaacaacatataattaaaagtgggtgtgagcaagcaatgccgatgtaacatggttggtcctgtttagggatgtatgaaatacctaacatgcttcccatccaagtagtattcatccttctttgaagcaactgtcctgcgcaggcgtacctcctctttgtcaacctgcagcaaagtattttttttggcttacaatcagatttacgactaacatgccatacaaagttaaccaaagaagaaagcacctaacacacagttaactctgaaatatgctgataaataattagctcactgttgactagtaccttgcatgatcacctaaaaagcaacccacgcaggcccaatactacatgcatgcactgtcatgggcatgaggccaagggccatggcgcatgtgggggacacggggagtgggatcctcaaccagacacatgaggcagttaggcagggaattattagttcccaattagttgggtttccctctttatagatatataccctatccattagatatgaaaacgatttagtagggatcaggtcgtgccatccctataaaagtgatgctgcccagctatcctctggcagtatctacccttcatgaattcagaccacgacatatgttcatatggaagatctaagagttgatgtatttttcataaaaagaatatgcagctcgagagtggctagataattgaattaaaatgaattaaagattaacgagttaaaggacttactggaatacggttgtctgaattatcaaacactatctcaacaaaagccgagacaaccgagtgaccagcaccttcctgaaatggttattattgtcacataacaaacacatgtttcaagtttaaactatctatcaagatcactcagagagagggaggatgcgtacatgaagaagagcgcccctgtcttcactgcgcaggttttgaaacatgtcactgaggacaaaccgtatagctggaggattataatgaccgagtgaggagaaaagtatcatataaggcagcataacaacaataacctagctagcagcaccacatatctaaaaacatattaccatggaagaaatttgatttgccagatccatttgccccaactgtaataaacatgcgaagttgcgttagttcatataaaattaaaatctgccaggattactatattcatcagatatcgcaattcactcccctgcaactccacgcagacaaggtaagtgcaggtaactgcaggacaagccgcacagcactttaaactaacacgcacaagatgacaaagtaaaacacaccaaacttttactaccctctagtcatgctagtcaaaaggggaagtggaaattaccaactacattaactttggggctgaaaggttctgttgagatctcctccctgtagctcttaaatccttctatcacaacctgcgcagacagacagcttctgagtcggcgcaaaccatatataccatcaaagccagcactgagctactcgcttggtagcagaacttactttctttatatacatggttgagacagggtgagctcaatccaccatgaaatcctacaaaaggaaggtcaaatgagtcaccagcacacaaatcaaaactccataagagacacgcacagtcaaatcgacacgaactaaaccacgagcccatcccacttcactcctgcgccctctcgtacctcactcacgactcacgagccgaaacgaagtccaccgcgctgagaatcatacctcgaaacgaacaaaccctaccccccaggccccaaccccaaccccgcgggctcacagaaccaccaccacccaccgagcgaaccaccctacaaaccctagcagcacacgacacgagagcgcaggaatcggggggaaaagacggagaaaccctagaatcgcgcgcgaggctactaccgcgcgcgcgcgagcaccccgagaacccccgactccgccgagggagaggggaagaggaatttacctcgacgaaatggggggagagagagacgacgacgacgacgcactccactccgctgcgagggcgagcgcgagcgcgagctaggggagcagtggagtagctagccgaggagcgagagagagagagagagagagagggggggagacgcggcagaggcagcaaggcgtcccgatccgacgacgaagcgtgtgcgtgcgggggatggcccagaggaaagaagcccacgcgcgtacgacgcgtggcgcacgattgggccttctctcccgcggcccctgcgacattgactgggccggatgggtagacgaggcccaacaagcctgtgttcaggtgccacggttgcagtacttgtatactaaagtggttatgtataattaatggtggtcaatagttattatttctatacaatattatatcattgtgctttgcgtgaaatatatttgatatatgatatgaatcaaatttctctattgcacaaatcataggaaatagcttttcctaacatgaaatttcaaaaaataaaaaataaaaataattgcactgtagcgttcgcactaacatattactagtgatagtaatatatccgtgcatcgcaacgggctagatacattacttaggatggaaggaggataactcggcttttaaaatagtagagaaaaaaccatatgaactagtatacctttcgttgttagccttcgtgtttcttgattgtatgatgctgactatttttgttcttcgtcggcaaagttgggatggtacagcgacaaaaactgacatgttatgcaacatactagatgcactagactaagttagtgaaagatggttaattaggtgagaccgtattgactttgtgctctttatatatcatcaaatagcataccgagtgttttttcttcgtgtttttatttagtcatttatagtcgttacattgtaagaacattttcaggtgaatccaaaaggcggatctatgttagaactttaagtttgttgcgtgttgcttacaattatcaaattatttgcctcatgccatagcttgaggtgtgtcaaattatttgtagttcttctgcaaaaccacaaaacaaaacagaaaacataactactctacacagttatcctagataataaatttccattggtggtaatagtcatagtttcgctgttgatatagggataaacagaaatgtaacaacaacacgtcataaataatagatgcatgcgccactgaatacatgtgacaccaaaaaatgttgctcttcttagtgacttgaaagtcaatgctgaaaataaaataatggtaaaaaattcaaaaaattaactctaaaattaacattttaaattaaaattttggctatggtcgataagccagaaagcaaacaatggctctgaaagcttaacattatctatccatcagctgagaacaaatccaaaaactgcatattcacaactagtccaactgtccaaccatgtaaataagacatccagccaaagcgagacatgcatcagccttctccacggaaaaaagaaacaatgtatgttggtagcgtaaaattgcaactaagatgatgttgtcaggcttgagtgtcaagagaagcaaaccattggcacaagcatatttggtctcaaatagcattctgtgtctggtcatgcccaatgaaatccagagcctgctcctttgacaccacattgatgtagctcaccctgttcttgtatgtcacaccatagattttatcagcaacttttacaatttccggtctgaatgttgtcgctataaattgagtgtcagccatgtccgaaagacggcggatcatatctgaaacatagcttaaggaaaacagatgtaaaattatgcttgtaatgttcaaagattcttttgtaacgggcacgagagagatagagggaagaaatacaaaggatactgccaacagcagttctgtactgtgtatccagagcagcatcaatctcatcgaaaagatagaacggagctggatcacaacgctggatggcaaaaatcagtgtcaatgccaccactgtcttctgcccaccagacaattgtttcatagattgggtttcaccctggccagtaaaggaaacctgaaactcgagtacctctcttagaaacttcaggaaatattttatacataatataattcagaaggaatataacaactcgccagcattatctaacatcacttgatttttttggttgaatgaatagtatacaagcgcagatacgtaaaaaagcatatgcaaataggacatgccttgacttttacaccaatgtacttctccattctatcttcagaatctggttcacgaggcccatcctcgtcattatcaatatcctcgtcgcctgcatcaccatcctaccagaaagaaaagcataagcattaactttcaagaagagatatcactttcgaaatagcacgcatggaaggaactttaagagaactccaggcaaaggcaataaaacaaagcccttgtttagttccaaactttttctttaaacttccaacttttccatcacatcaaaactttcctacacacataaacttccaacttttccgtcacatcgttccaatttcaaccaaacttccaattttggcgtgaactaaacacacccaaagttggaaattctaaaatgtgtcgatttgcactgtattcaaacttggcgctagctttgcattgaagaataacccagattttcaaaacaaaatataagaccggagtaatgccaattcatggaaataggtgagatagcataggttagccaatgaaggtgacaacaatatcagcttttagtccccagaaaattgtggtaggctatagatgaaatccaagtaaacccagtgaaggtgaattgtgaatttagcacaactaaaagcacattactgggtaatagggctaaaagcctaaaagtgcatgccatggaagcaagatcagtcggaaagcaaggaaaatatacttttttcttcatcataaccaaatgtccatggccaccttgcactagttcagaaaatacttctcggaagtgcctcgcaactcccttaaatgtacgttcaattgattcatccttcctttggtctaaaattgacacgagttccctgattttctgcattttttatgagatacagtgtttaggattcaagcgaaacaaaaggcagctgtaccaggggaaaatttcacctgatcaccagcatcaagttcagcccttcttctctctagttgttcacgttgttctgtgaagttcacacagtcaagaggttttttcttaacatgtctgaactgctgcaactgttcattgcagtcgtaaagcatcttctgcagctgcctcttatttttctgtctgtacctgtagcattggccatacaaataggattggtatgcattctggactgttcagccagttcactcatttatatggaaacaaaactaggtagccatgaaaaatgcaatacgtctcaaaagcgtcagtaggcaatggtgttaggcaatagaatatgccgtctgtggatatcccagctgctatagatagcagatgtaaatcagggattagctactatagatagcagatgtaaatcaagggaattatccttgccttgtacagcaggccagccggccctatataacagaaggcgccccctcccattgaggtgtggccaattgccccctaatccaattctctacatggtatcagagctccgggtcccgatccccatctaacctcgagatcctctcctccagcgccgcccccttcctccctccctccccatgggaacccaatcggacctcctctctgccactagcggcgcccttggggccgattctgcccctgtgatctgccccttcgccaccatcaacatcaagctccacgtccccatgaccctcgagttgaagccctccaacttcaccaagtggtcaacagcgttccaggccacgtgtgggaagttcgggctgctgcatcatctcgccaccgcctccacctcgcgccccaccgacgaggcctggaaacaggctgacttctgcgtccgcggatggatgtacagcaccgtctccgacgccgtcctcaaccttgccatgaccgacgacacgcagacagcgagcgttctttggacggccatcggcggggtgttccaggcaaacaaagctcctcgcgccatcttcctgaatcacgagtttcactcgatgactcagggggacctgtccattgacgcctactgcattcgcatgaaggagaaggccgacgaactgcgcgacgtcgggcagcccgtatctgagcccaacctcgtcctcaacctcctgcgcggactcaacgaggtctactccggcgtcgccgacaacatcgccggacagcagcccctcaccctcgccaccgcacgccatcagctcctcctcaaggagctgcggctgcaaaacgacgagaagacgcgtgctgccgccgccctcctggctgctgcctcctctaatggcggtttccagcagccgcagcagcagggtggccggcgccctaacaccaaaaagggcgcccaacagcccttcccaaactcctccggcggcttctccaacaactccggcagccccggcaccaacaaacgcattccctggggcttcaatccctggaccggcgaacgtgtggcccctggagagcgcgtcaccccccctggacagcgccgcaagggaggttctggcgcccctggaggtcctggtgccccggctgggcgcaaccagggcatcctcgggccttccccgcaggcccacaccgcctttgctccactccaggcgtcctccagcggctccaacacctccaccagcacctgggatgcagccggcctcatcgctgccctgcagaacatgcaactgcatggcaactcgccctgggtcgttgactccggcgcctctacgcacatgacgtcctcggatggtatgcttacccaacgccttcccccctccatctcctcaataacagtaggtaatggcactagtattcctgttacgtctagaggtcattccatccttcctacacctaccacaaatttcgctcttaataatattcttgtcgcaccatccatagtccgcaacctgttatccgttcgccaattcacttgcgacaatagttgttcctttgaatttgacgcccatggtttttctgttaaggatctcaggacgggacgcgtgattctccgctgtaactgcgacggggacctatacaccatgcctccctccacacctggcgccccacctcatgctctcctggctgcttcgtcgactctgtggcatcaacgtctcggtcatccagcccccgccgcattagagcgtcttaataaacttcatgctgtttcctgtcataaagtagaccactcgctatgtcactcatgtcagataggcaagcatacgcatctacccttcagttcttcgcattccataactcatgcaccctttgaacttgttcactgtgatgtatggacttcccccatcaatagtctgtctggtttttcctattacctggtctgtttggatgatttcactcactactgttgggtttttccgctccgaaaaaaatctgatgcccaccaacacttagttgagtttgctgcctttgccaaaacacaattcagcctccccgtcaaaagttttcaggctgataacggcactgaattcgtaaacaccgccaccatcaaattcctcgctgctcaaggtactcaccttcgcctctcctgcccctacacatcaccccaaaatggcaaggctgaacgcatcatccgcacactcaacaattccattcgtaccatgctcctccatgcctccctgccacccacatattgggccgaggggctcatgaccgcctgctacctccataataggcacccatcctcctccattcagcatgaaattccctacactcgtctgcacaaccagccgccaacctatagccatctgcgtgtttttgggtgcctctgttaccccaacatgcaagcaacctccaaacataagctcgcccctcgctccacggcatgcgtcttcctcggatatcccccctcgcacaaaggttaccgctgccttgacctatcgacccgtcgcatcatcatctctcgccacgttacatttgacgaaaccacctttcccttttcagccaccttagccgcctcaccctcctccgcttccctagacttcctcctcgacgacgatatggtttcggtgccttgtcctactgttgttgcaggtgggcttccatcctcgacgcccgtggtcgctccatcccactcggatgttgagcagccgccctcagatgctgcggcctcacacggatcgccttcttcgacaccgggcgggcgcggtcccgtgcccccgcctggacccagcgtggtccccttcccacgagtctacgtccgccgctcccgtacggcgtctacgtccgagccggcaactgccccagcagcccctgtggctcctgacgccccggcgccacctacgacgcccacaccagcaccggcggcattccccgttccggcaccgccaccgccgccaccgccgcgcgccactcgcaccatgacgggtgtcattcctcgcgtcagctataaagggttggcggccacaacgtcatcctcaccgtcgccagtaccgacgaactaccgcagtgccctggccgacgccaactggcgtgccgcgatgatggatgagtaccaggccctcgtcgacaacaacacctggcagctcgttccgcggccccctggagccaacgtcgtgatggggaagtggatcttccggcacaagtttcatgccgatgggtccctcgcccgccacaaggctcgctgggttgtccgcggcttctcccagcgcgagggcgtcgactacgacgagaccttcagcccggttgtcaaaccggccaccattcggtctgtactcaccatcgccgcgtcccgcgcctggcccattcaccagctggacgtgaagaacgcctttcttcacggccacctcgaggagaccgtctactgccagcagccgccaggattcatcgaccctggcgccccagagcatgtctgccgactgcagaagtccttgtatggactgaagcaggctccgcgggcctggtaccagcgcttcgccaccttcgtccggaagcttggcttcgtcgcctccacctccgacacgtcccttttcattttacgagaggggatgagtctcgcctacctactgctgtacgtcgacgacatcgttctcaccgcctcgtcctcggccctcctacagcgcatcatgactcggctgagctccgagttcgccatgacagaccttggcgctcttcaccacttcctcggcatcgctgtcacgcgctcctccgatggtctcttcctctcccagcgacagtacgccgtcgagcttctccagcgcgcgggcatggctgagtgtcatccgacatcgacacctgttgacactcacgccaagctatccgcgaccgactgggatctactgtcagaaaaggatgcatctgagtacaggagcttggcgggagctctccagtacctgacgctgactcgtcctgatctggcatacgctgttcaacaagtgtgcctcttcatgcacgccccacgcgagcctcaccgtgcgctcatcaagcgcatcctacgcttcgtccaggggactctctcctcgggtcttcacattggcaccgggtctgtcgacaaactgactgcctactctgatgctgactgggcaggatgcccagactctcgacgatccacctccggcttctgcgtctatctcggcgacactctggtttcctggtcttccaagcgccagaccacggtgtcccgctccagcgccgaggcagagtatcgggctgtggctcacgttgtggctgagtgctgctggcttcgacagttactccaggagctccacatccagctgccctccgccaccgttgtcttctgcgacaatgtcagcgccgtctacatgacgaccaaccccgtccaccacaagcgaacgaagcacatcgagatcgacattcacttcgttcgcgaaaaggtggcccttggtgagattcgggttctccatgtgccctcctctcaccagttcgccgacatcatgactaaagggcttccgacagcactctttcgagaatttcgatccagcctttgcgtccgggagcctcccgctgcgactgcgggcgggtgttaggcaatagaatatgccgtctgtggatatcccagctgctatagatagcagatgtaaatcagggattagctactatagatagcagatgtaaatcaagggaattatccttgccttgtacagcaggccagccggccctatataacagaaggcgccccctcccattgaggcgtggccaattgccccctaatccaattctctacaaatgggcccaagtctcggatcttcttcatacactcttcttgcttagctaaatgcatgctcctgctgctcatgagctgttccaaatccttggcaccatctcgcacagtctggtccaggttagcttcaagtgtctgtattcaaagataaaccgttacacaagtcaacgtgagttctttcaaaaatacgtccatatagctatattcaacttaccttcagattatccctttgtcttttcagttcctctatctttatcgtaaagttattgatagcatcgacattagctaccaaaaagatcatttgagttagcttaacacttggccccttaggaagcattaagcataatgcagaagggaactaaaagtctatcagtgcgtctatacctttcagcatcgcagtcaaatcatcaagactgctcttagagctatttaattcttgctcttttgattcagcttcaagagacaaggttttagaatctgcggatgaaattactgcttcaaactctttctggcgcctcatgagattagttgatagattagctttcaattcttctttccttgtttctatctacataaaaaattgtaactgcattagaacagagagaatcttcaggggaaaaaagatggttgctaattttcttgaacaacctcaatgcgtctgtttctacataagacaaacttcccctttagttcagttaattcagtgttcaattgcaaaagaagatctctttcttctgaagttaattggtcaataatttcagttcccatttcattatatttcattgcaatgccagattggatttgcacaatttggttctggatgttgtcgagagatttttcctgcaaggtagaagctattagatagagttgcaggagtatagcaaaatagacattttatacacaactttcatattgaatatcaagacagtggatctcccatgaactgcagtaaaagaaaaggagaaccaccttctttcctagtgccttctcaagtgatcctatttgcttcatagtgctagcaatgccaaccttaaagtgttccaactctgattttgcatgatcactttcagcatccatttgctgctgtttggtaactaaatctgtcattttcttatctatatgtatggaaagttaaggagagaaaattcaaagatataaattttgtcttgcacataagtagtagtagtaatcagcaactcagctgtctcagcaagaggcttttaatgtttcaatcacatatccaaactactttgaacttgaaaccaaacaaagcaaacaaacatgagggacgccttgccatcctccctcacaaacatgtggcttctggtcccatatgtcatagtcacaacagcaaatcctcattgccaactattaacagtgactaatacttaaattttgctagtttgttggcccaacatgttgaagacccagcactccagcagtattcttatttcttaccatcataataatagtctgtatgctttggcatactccctaaaaaaataaagttatgtatgctttggagaaggttattgtgcatgcttatttccaaccatcagagtaatggccaaatgagctacggtgcaagcaggaaacattaaatttaatagtaaactgttaactccttatccatcaggtcaggtcatgacagaacgagcatcttctataccagcgtcatgtaaacaaggagaaaggatatcacttagattcctttcaacattctttagatgttcctccttttcctcaattgccttcatattgttcttaattgtttttacaaacttcagttttgagcatctatagtcatggaaacctcctgtcatatgaccttttctggcaacttgatcacctgataacgactcttattaatattacaccattaattaatgctgctaatgacaagtgaaaaagtttgaaactaccatcaagcgtgatgcaatttagcccgttatcgcgtgcaactttggtcgcagtttccaggtctttgcatattactgtcctgccaaaaacctaacagaaatacaaaacttagactaaagtaaaatatatgacaacagaagagatgctatgcaatctagcccagataagcatataacagcgaaacgaccactctaaaaagatgcactcaaagtaaagaaatgttccatgcacacatacactctgaccccacgcacgtatgaaagcatgggaaggaaaggataggcgatgcatgtcaatacataagttatagatgttcataatcatgaatttatgacccacctaagaacccgttactctaagattagtctcagctaaaaatacagggtatgctctagtctggttagtatgattcatagacttaatacaacacagtgccaaaaaataatacattatttgatggtctgccatggctactgaacccaagctgatgttgctgggtgtaaacctccaagcagacaaaaggcaagatgtatacatgcagaactgaagcatgagtaagacagtgcagatgaagggcatgatagaacgaaaacatcaattaaatttaccaaggtagccaataaaatatgtagatgtcaattgaaagagcatgacagaaaaatgtgggctaccatcggttggccaattacggataatacgtcaatcggcgtattagcgacaaaaaaataatttatagttaaaacttttacctatgtgttcttaacgaattaaatgtcaatgttgaaaaagaaattacgataaaaaaactcaaaatcaactccaaaattaatttttaaaatttaaattttgacattgtcatatacgttatagggcaaaagatgtggcccatggattaatacctgttcaaaagcacggcgatgattggccttattacattctaatctctctaacaatggaacaaaatcgtcacttcgtggataactaacatctggaactttcactctattcagtggaataaatgtcacccgtccgcctttttctcgagtcaatacttgaatgattttcgttgatatgtcgtcattctcaacaactacatggaacaggctactcacaacagaatagaatacatcatttactaaagaaacagtgaaatagttaaaaaaaaatctggatcatgtcagatgtattaaatagcaatttaattcaagacctattccctgcagtgacctcaacagcagtgaaaagcttctcatcacaatcaatcagctctagtataggaccaacaactcctgtaataccatgttccatggtaattctgctaacacaatttaagcctcttatgatatcctgaggaaggaaaaaaaatcacaacatgcaaataaagtttcaagcattttcctgacagaaaaataatataatatggcaatagttggcaaaactcgatgtttatagggctactatatcctttcaagaacaatcataccaagcagaagaaatatttaacaataaacaaagcaaacatttgtcaaattatcaatcaaaaataaaaatcaaactagtagtatcattttttaatgattatgtaagtttgttgatactgccactatatttaaatatatgacactgttcactttatttggtcttcggcgtgcaactttgaccactattcttctattagaatagaacgataatatcttctttttttataatgtagaattacttacaaagaaaatatacccatagcagtcagtaatatgaacaaaaaggtgtgaaaaaaatgtagcatttccataccccaggtgttgcattgcccagcttctcctttgcattcacaagattttccttgagcctatctttttcagctgtcacattagcttcctccatccaaaacgatctaggacatttttcattatcagagtatgtaatgtataaagtaatagatcttccattaaatcaaaaggccatgactgttaagaaatatacgtaattcctttcttcttgaagcttgtctctctgcttcctcaagtcattgtaatcactgtgcttctttgcaagtgcggactctaatttgtttgattcactttcgtagaactcaaaatagctattcaagttattaattttgtctttaagcttctggatttcttcttggagtaaacctccctggagtagttgcaaggcaggtaagttggatataaattcatcaaacagcagaagggtgattaaaaaatcacatgactggtcaagttgagagcaaaaaatacagcttaacataatacataatgtattaaccaagctaaaatataatacaacataacctgctttcggtttgataaaagcacacactcaagatcatcaatttccttttgaagccacttatctctggcagctttgtttgcaaattgggttgccctcccctgcttttggtacaatatacttaactgcttctgacggtccattatgctatccccacaaagtgcaagtgtcaaaacgagctatcataaagaaaagattatacatggaaattattctaaactctcgaggggacatcccctcattgtttgcatgtcctctaaatggttatgaaaaaattgaaaaaaatgaaaaagatagattagtatgtgataaatcactccacaaacatgcaatgtcaaatttaacttctaaaagttgcaacaaaaaaaattgactgtgaatatacattaacaggccatagtttttttttgttgcaacttgtagaagttgaattttaacttgcatgtttgtggagtgatctatcacattaatatctatcttgataaattttttcaaatattttcataacaatttggataacatgcaaacaatgaggggatgtcctctcgagagtttagaatccactcccagattatacatcaacatattttttacctttttgatatttcttcctcttccctcagtttggtttgatgcaccttactagtctcagctaattcagactttgacctttcactctccatcctcacactttgtgaatccctcgcagcttcatcctagaaatagattttttttaagtgtagcaaagaaaaaaacaaaaaaaatcatgagaaatatcaaatatgaactatggcatacctttgccaatttttcattcaaaattctatcttttatatctctcaaatcaagctcaatttgagcaactaccttaagcacctctgtacacttcttctctacatcttccttttgagccttgttctcatttatccccttggttgagaattttatttctttctcaaaactcctgatcttctcacgtacatctaccacttcattatccgcatgggacattctttcagaaatttttcttcggttatcatccatctaacaacaagaggaatcaaagcaggcagtaaaacaattgatccattggctataatgattaaaaatgaactcttgtcactctcgttttcaccaaccaatgaagaaacaaacatttttttttaactgctgcccggatccagagcagtagggttagtggtatagtgggtggttactgatgaagccataaatactgtgttttctttggtttttttaagagtgaattttacatatcacatcgcagtttgtataatgcaaatatggttgatgcattgagggaacgccttaattcaaaagtttcttccatcacaaccaaaaaaatatgacatcacagtgagtaggaaatgctaaattttaaaggtttgtttgccaaacttgttgcaatggtcattcatttcttttagtttgaatattccaacttgcatggcaggaaaaatgcatcttgaaactaaacgtacacaacaaaaatggtagaatcttaccaaagctaattcgttcctagtatcatttagttcatggtccagtatggtatactcaagtgatcttctttgtttgtccagctgctggtacttcttcatttcttctttctcttcatcaagttctctcaacctttcctccaagtagtggacaacttgatcaatctgctttcttttgttggctgctaataaatcatgaatcaatgtccacttacaagaggtcccctacaaatatataaacatttatgataacttaaacatgcctgtttcctgcatgattttcaaactctgtcgccgtctatcttcataaacgcgcgtaccaccgatctctttcaggagttccagtcgttcagaatctttcattagggtaagggctgcaatctactcataacaattttcattacattatagctgaacagcacatggcaacaatcaggtgaaaaaatattacctttccctgctggacaacgtaatatggatttgagcgagaaaatccagcattctctaacagattcatgacttcagttttactgaacaacatagaattaaaagggggtacaagcaagcaacactgctgtaacatggttggcctgtttaggggtttatgaaatacctgatatgcttcccatccaagtagtattcatccttctttgaagctactgtcctgcgcaagcgtaccacctttttctcgacctagagcaaagtagttttttttctttcactcacaatcaggagcatgaataacatgccatacattgttcagcaaagcaaaaggcacctaatacacagttcttgctgaaatatgctgataaataactagcagtacactgttgactaccttgcatgatcacctacaaagcaacttattagtttccttaatagttgggatccctctttatagatatatcctatgcattagagataaagtcagtttcttaggtatcatgtcaggtcatccctataaaagagtggcatatctatccattttcaattacacaatgataaagactaatctctagtctctctccaatgatctttaccgcagtctaagttcccttatcatccctagcagccgatgatgcccagctttcctccagctggtgttcaccgtcaagaattcataacatgactgaatagcatgcactcacatttttcgggaatacgcaaggagcgcattttttccattaagagaaataaaagttatttacatttgaaagagaaaaacagcacgggactgatacaggacaataacagacaatcctaggtctatctctcgcgctgattttggcgaccaaactccctcctgaattgcagcgcagggatcgtcgggtttgctttatgccaaagagaggcttcgtccaccatccctctagccacatccacccaagatctacactgctgattgaagatccgaccgttccgttccttccatattgtccatgctaccaatgtcaccaccgtgtcgaagcctcgacgatgtgactcacttagcaccattctgctatcgcacatccattggtgaaaagaagcttcattcactggcaggcagttggggtggccgattgctctcaaagtccaccaccaaagctgccttgattctgggcagccgactaggatatgatcaatgctctcatcttgctgatcacagagaatgcagcggtcgggatgcggcaatccccgactccgcagtcggtcggctgtccagcatctgttcaacgcgaccagccagaggaagaaacgacagcgaggtggggccaacgagttccagatcggcgtggattcaaaggcaattcacccaaggaacaaagctcggtaggcagattttgaagtgtatttgcctgagctttcccacttccaggagagtgagtcgggctctgcggaagaacaatcaactgactgaatcagcgaccaaagtttgaggtattcgagtattgcctgagtcccaagcgcgccacttatgtccttgatccatctacggttagacaacgcttcagccaccgtccggcgcttccgaatacgagtagagacatgatcgtagatggagagtgcaatagctcggatggttcctccttgcaaccaattgtcctcccagaaaaggattgtttgcccgttacctagctgacagacggtggaggcggcgacaaggtgaagttctttctgtgagcaagggatttccaatccctgccaaggcttggtcagagaggtcctttgcatccacgtccagcgggaacgtagtgcaatgcccatgagcttcaagtttggcacaccaagacctccataatccttgggggagcatactttggtccaggctacccggcagcatccaccattcacttgcgccttacccgcccaaagaaaaccacgccgtaccttatcaatacctttgatcacccacttgggtgcatcaattgcgaccaatagatagattggtatggcgctcaagacagcattgaccatggttacacgaccgatcgacgacatctgattagatttccatgtgggcagccatcgggcaaccttgtcaacaagaggctgtaggtcctcttttttcagcttgaagatgaatagcatgcactcacatgaaagatctcatagttgttgatgcattttcataaatagaatgtgcatctggagagctagataatttaaatcaaatgaattttgatcaacgaattagaggacctactcccggtaaaaaaaaatattagaggacttactggaatacggttgtctgaattatcaaacactatctcaacgaaagccgaaagaactgagatgtcagcaccttcctgaaatggttattgttatcaaatagcaaacacctatctcaactaaatcaaagagagaggatgcgtacatgaagaagggctcccctgtcttcactgcgcaggttctgaaacatgtcactaaggacaaaccgtatagctggagcattagaatgcccaagttaggagaaaagtatcacataagcataagaataataacctactagctagcaacatcacatatctaaaaaatattaccatggaagaagtttgatttgccagatccatttgcaccgactgtgataaacatgcagatttatgttagtttgtatacaattaacgcatacaaagattactatagtcatcaaatattgcaattatctcccctgcacccccaagaaaacaaggcaagtgcaggaaactgcaggacaatccgaacagcgccttaaactagccatgcacaagctggcaaaaactcatggacatgttggttagatggggaggaagaaattaccaacgacattaacttttgggctgaaaggttctgttgagatctcctccctgtagctcttaaatccttctaccacaacctgcacagacagacagcttctgagtcgacacggaccaacatgtcatcaaaatcagaacagcagaacataccttctttatatacatggttgagacagggagggatcaaacggtcaccatgaaatcctacaaaatgaagggcaaatcggtaggctccatctagacgaactaaatctccatacatggcagcaagcatgcatatgcacacagtggaaattgatcttttgtgctgaatggtcgaatgaatgatttgtgataattattctattgtacaaacgaaaaaattaactattattataaagttgaaagacggacttaaaacaatattctatgacattcatatatagaattgtttcagaaaaaaaggaccatttagaagttcggaaagcatgcccattaattcagttatccattccttcaaaaagaaagggtctaaagatcccaatccgtacaatactacgatcctaccaaaccaaaatggtcctaagccaactttcgtagtatcccaatcctaaataagagttccatacgatcccttggtaacggtagagcttacgtaggatcccgatcctacataaggattatttaaaatcaaggtgggttaaaaataatgtgagtaagtccacacaagtttctaaagaagtcgattaaatttatcaaaatcaatattataagctttaatatttttttcagaaataagcattggatttgtgtatcgttgaattaagattgaggtgtgatacatacaacacaacggacacaagctttaatttttgcaatgtattacaaatcttatattttaatatacacttatataaaatctgataggatcccaatcccaatcctacgatcaatatatcataaaaaaaaaagaaacgattctaccgagtatctcgatcctaacaagtggcaacctcggtaggcacgaggccgagacgaaaagaccaacgcgtgagagtcacagctcgaagcaaacaaacactagtgtacactacccaacccgcgctcatggaaatcacctggcgaaccacccaaaaaccctagcaggggaatggggggacaaaccctggactccgcctccccaaccgcgaccgctggcgagcaaatccggaaaccccagatgaaacgaactccaccaccgagcaagaggggaggaagaatcaaaatcacctcgtcggaatgggggggagaccgggccggaatcgatcccgaaccgggaggaggacgaataactgaagaagacactccccggcgacggcgagcgagcgagcgagcgcgcgagaggagggagcagttgccgtgggggtaggagatgagggttaaatagacgtcgtttcgttcggcggcccacgtcacacggcccatctgttgcctgtttagtcacatcacatcacatttcccaaaataaaaaatttcacgctgtcacgttgaatatttgaacaatatataaagtattaaatgtaataaaaaaaatcaattactcagattgtgtgtaaattgcgagacgaatcttttaagtaactgcgttatgatttgataatgtggtgttacagtaaacatttgcaaatgacggattaattagacttaataaattcgtctcgcagtttcttggcaaaatttataatttattttgttattatactacatttaatactttaaatgtaggtacatatattcgatgtaataactaaacccaaaatttttttccaactaaataaggtcttagtaattggtatcattaatatatatctcattatttttatggttattattataatgtttaaaataagagtagatattaagatgtaccacactagtgcaaaatcctagtagtacttttttatcaaccatgccaattttttctcctcacatctattttaccctattattctttttgcttgtggtcaagctataagcttaaagctttcttttttgcaattactgttgtgtggtttctattcacaacgtacactgtattgcccctatgacattttcttatggtcatattgtgttttccctaacaataacatcaattcatagcctaaaatattatacttcaattctcttgtattttaaaacggagccagtactagttcgtattaccatttttttctttaccgcacacgtacctataaataacataaatatttttttgttttatctattctaaaatataactacatattatttatctgttttttctaaataatagacggattaaaaaaaacaacatagatcatttatatgtttgacatgcatttcattatttaggggtttagtttttatagaaactttttcgggtattttttttatcgaaactgatatatcttcagaaaatactttcaaatataaggaagaaaatatttttagaatattgtatagctactcccgtctcttccgaatacacgctactgcgcctttcctgggccaaagcccaatttgcttccacagaaatcggcccaaaacatttttgccttgccaaggaggaaaggaaaacaagtcacaagtggaccccacatgcgctgcctcaccactctcactgacgggtggaccccgcataaacactctcactgacgtgtgggccccgcagaaaccctccaccatcctcctcctcctccccatcttggagtccaagaagaacaccaccgcaaaccaacccaacaaaagcagggcacacgcatacacatcgcaagccgcccaaaccctacacaatcttcgaatccccaccgaatcgcgcgagagagaaatccaaggcgaggacgaggaggaggagaaggaagcttcgagaatgttccggaaccagtacgacaccgacgtgacgacgtggagcccggcggggcggctgttccaggtggagtacgccatggaggccgtgaagcagggctccgcctgcgtcggcctccgctcccgcacccacgccgtcctcgccgccgcgaacaaggccgcctccgagctctcctcccaccagcggaaggtcttccgcgtcgcagaccacgccggggtcgcgctcgccggcctcaccgccgacggccgcgtcctctcccgattcctccgctccgagtgcatcaaccacgccttcgtctacgacgcgcccctccccgtctccaggctcgcgctccgccttgccgacaaggcgcaggtccgtctcggttcccaatctccccccctttccctcttctcccctctctcccccacttgatctcttcgggtgcggttggtcctgctgctggattgcttgatctgctcgtgtacttagggtttcgtggtagggggatcagatctaaagcgctaactggggtttcgtgcttggggtgtttccccggccgggattttggttgttgattagggttacgatggcaggtatcgctgggagcgcgtgcttcgatgatcgacaactgatttgatggattggctagtggcgcctatttatgattgcaatttaggagtatcagtgcttaggtgattgtgcttaggcgattggattacatctgttggcatgtagaagtttgcagcactactgaaaattagaaattcagtacaaagatctcctgatgagtctcactccccagcttcttcttaaaagaacagtacaaaattaagttgccatcttcatatcatacttgacatgccgatgtgatttcagccgaggatggtgtgtaaagatggtcgcgaatccaggtttacctgcccttttatttaactattggcatcagctagacaaatatgtgtaagcgctgtagtagtagactttgcaagcgaaatgcacactcttggatctccgcttgttaagatgcacaatctgataggatacgagtatatgatcaaaaaacatatggagtaattatcttttaatagttgacatatgtgcttcttcattgtatggttctgactattttatcctgcatcaattcatgcacacagcaaaaggctgtgatattatgcaacatacctagatagtttcataacataacacttataaatcaccaaaaaatctagtgaaacatacatacatagtagtgaaagaccgtattgaccttgacaccttgttccttttagatataatcgagtagcacattgactgagttatttgcagtttactggaaacaagcgagagctagcatttatttgtcacgtttttaatcatttattatagtcattatatggaacatttcctgtaatcccaaatgttgagtttaagtttgtattatacatgtgtttatgtgttgcttctagtgatcaaattatttgtttcatggtgtaacatgagattttggtatgctcagacactcgttgaggcattttcctaataagacaacaattttcaatttggtgcacctgtttatcagcttgatttcttttatttttaaatttctgcaagccttctcctttaatgtccatatggatggatggaagctactagggaattagattgtgttgtcgtcttcagaaaaaaaatgtatggttatagataataaaagtattcactgttgcaaacttgaaattgctgctttaagatgtctttgacttgatctctcactgcaccagttagatttataaatatctagacgggttagcatatgcagtttggaagcaaaccagcacagcatgattcaactgtcaaaccatgagaacgcagatggattttgtaagtctgctccatgagttgatgattatctgcatcattgtaaacatgtttgaaaattagaaggtattttttagggaaaagcatctctgcgttgtgaatagctactcagatttagtacattaacaagctataatctatgactctccatgtgcattgtgatttcattgctttttagtatgctaccttctttcatgcatatattttatttttgttgaatctggaaaatcgtttttcagatattaaagattgcaaagctatcagtggaggtttctttttcttgcctggctactataacttggaaaaaacgccatacatcaattgcattctcatgttcttgtacatctagctttgtttcctgttatctccagcatgacaattaatctgttaatcttaatccattaccttatcattgatttagagtgtagttgttgcttacagcatcagttttcaagctgtgctcagtgcgcatctgcatcatctcaacgtcactttttctgtagcagctattgcttcattctccccttcgattgccatcatacttgagcgtgcacctttatttccgtagtgtgcctattctggggagcagttcatcggataagctgcatctatttccccatggccatcaagtttacttttgctttcgtgattctactctgcaactgttttaattgaacctgttcaccttatgctgatgtggttgttagttgtaaacgattgatgtggttgctggctgtattataaatgatttcagccagatatgtatattttcggaattaccatttgtcccaccacgttcctgtggataatgtctgtttctttgatggtgttgcaggtttgcacacagcgatcatggaagaggccatatggtgttggcctccttgttgctggattagatgagtctggagcccatctatactataactgccccagcggcaactattttgagtaccaggcatttgctattggctctcgctctcaagccgccaagactttccttgagcgcagattcgagggctacaacgactacaccccagagcaacttatcaaagatgccctctccgccataaaggagacgctgcaaggtgagaagctaaccagctccaactgcaccgttgctattgttggcagaaaggacgatggcaccgttgagccatttgagatgatcgacgtgaagaggatccaagaaataatcgattccatggaggctgccgaggaggcaccagcggcagaggctgagtcgagctcgatgcaggaggaggacaagggcacggacgccgcgcccatggacatctaggcccaagatacatcttatctcctcccttacaccgtgtctgagtttccaaaagactactgttttagaaagctgtgactgttgtgtaccctttcttcagtactacaactttgcgacggtctctttgatcaacatcgattgtgttttggaccgattatttacatgtgatgcggacagaaaatctctttggtttcggggaccagattacgtttgcttatcattcgttctgatgccattctgatgcttggaatgtttaatgttcacatggttagggctctgtgctagcaatcgctgctagctgcacgtccgtttgatgtaccaatgcgcatgaagctgctgttgtaaattctcttcgttttaaatgcggcttggtaggacgatgcgtcgatgcccttcgtcccagtttaaatttaacccacttcaaatcttttttttttacgggggcaaatcttaagcagaagtgagcagacgtcattgtgtgctgctgtagtaaattcatttcgctaataatttacatctgctcgagtaatcagacgcctttgttgtagaaaaggcgcacatcactgtactacgggcttgctggctgctgctacacaagtactcaacacatgcaatatccttgatgtcatagctgtttgctcttcgtgcttataaatgacataactatgcaatttaggtcgattttaatgtgaatttaggtccattttgattctgaaaaaaaatatactgatacacaagcattcagcaaattttggagtgaaaaacactgacactgacaaccctggcccaccgtcacacgccgtggccccgagacgtcagtggagttttagtacttcccaaatcataaggacacgtcataaaaacgagagctcgcctagttctctttcttcccaatcaccaccacctcgtctccactctccacgctcccgcatccatggcggcctcctccgcccgcctcctcgccgccgcagcgcgcggccgtgccgccaccaccttccgccatgctcctaccgtctcctcctccctctcattccctcccaacccgcaccaccgcccgtccctccgcggccgcgctggcatctccttctcctccacctccatctccctcccctcgggctccccgcacggcgcctccgcccccttcaacctcttccctcccgactccgatcccttcatacagtgggaccctccccctcccgacgccgcctcgccgctcggcgccggcgccgccggccgcgaggcgcccggggacctcacgctggtcgtgctcctcgggtggctcggcgcgcggcagaagcacctgcggaggtacgccgacctctaccgcgaccgcggggtcgggtcggtgcggttcgtggtgcccgtgcgggagctcctcgggctcgacctcggccgccgcgtcgagcgcagggtcgccgacctcgccgccgagatcgccgcctggtgcgacgccgaccaccggcgcacgctcctcttccacacgttcagcaacaccggatggctcgcgtacggaaataaaaccttcatttttcgttatttactcgcttctcccaataatgtgctattactgttcttccctgaacaccggatggttgaaattgaagtgtttcaaaccggacaagaagttgataggttggaattattacatgcgcatggtttgcacatgcgattgcacggcctcaattaaattgggcaatgtgttgcatctttgcggcaggatagaattgatacacgcacatgcatgtttatgctgtgacacattggttgttgcataggtttggttgataaaaacgtggttgatagaggtacgaaagaaatccaaatggtttggacagcatgttctgggaaagctcgtcatcttctgtctagagtatactgtggataatggagctactccatgatattccaatggtcaagataatgagaaatggagtgcgataagaacttagcaaaggtgatcggttgaagagcacaacagatatccatttgtgagtgcatagattgagtaaacagcgtggataacagcatgatctatgtggagttgttaggccaccttgattgtgctagattagtaccatggtaaaatatttttttcaggcatttttacctcataatgagaatcactagcaacggcgtccagtcactgacagtctcatataggtgaatcacattcatggttgatatggctgctgttgttaaggactacctaattgaaaaaacatggtgtgttttgtttttctaatagtttctagtggaaatttcttgtggtgcagtgaaagataattttccatttctgccttgcctagaagtcagaaatcccctagtggaggttttatttgataattcggtgatctgtggtcatgccattcacatggctatatatgagaacttcgctatcaaatttctttccagatatggtgctatacttgagaatctacaatcaagagctgatataattgagaggatacggggatgcattgtagattctgcaccagttctggagataagaccagaggtctggacactatctttttgctgcattacatatacctgaaataagcttttaactggtagcagtaaattcttgttcaaatacattttagtatgttggatttgttttttcatcttgaactgtcgtaagatcctattactatagctagaatggtttgtgctattatctggaagtttccctatgcaaacaaatctgtttaccaggaagctcatatataaacttaactcaggtctgggctgctggattctctgctgccatgttgaagaaaagcagttccatgacaggaccttcagttgaatctcctgatggatatacttcaaatggcaccttgaacaaccttagctctgatgtgacgagaccaacatggggtgaaaatattcttctatctactctacagaaattcttcgagattgtccttcatctacctgatgtaaacaagtaagtccttaccatgttcaatcagttctggttacgtgttttgaagcatggacagctcacaccgttgtactcagaagttaacttgggttttatagattggaattaaacaatgctgtatacttcaattactacttcattcacactgccatgcaaaactcattgttttaggcaccttttctatgaagattgtaggttgactgccctcaatgagtaggtgtcatatttagcaaatggaagagtagtgggggtataaaaaagagagacagggttgagaaaagattttggagatattgatttatctcttgcttgctcagttgccctaaagatttattgaatggtcatttggtcccttttatagggaagggcatatgcctagttgacttggcagctactgctccaacctggactcttttcctaaccaagttttataacctacaaattctatcatggactctcctgatgttgctgactaatcttgctgagtacgtaaattaacaaaactcctgatgaacatataatctaggacttgccctatgccatcttctgtctctaaaaggcttactgacgtcctctttgtgattggaaggtcgcaacattcataaaagaatttcgtagcatattcaatttaacagaagagcagcagtatgcatgggtgcctcttttcattatatttctccatgtggactgaactttaggttactgggctcgatgcataaatacattgttgttttctttcattgcacccgcaaaaaaaaagtattataccatgtctatgggcagttagacactgaatttcactttcagttgatttgcacagtagatcaaatggacctttcaacgtgtcatgtttgcaatgcattaattatgtaattttggcaaagcaaatcatgatggttcattgtacagctcataattactgtgagtgactacagtttatttagtcagacttaggtaacttctcctccagttttctccaaacatgacttatttacgttatttctgttccatagattcagcatgatcagttattcccaaatcataccatagagtgatagagattcacctgatggctctttctgttacctgacatttttttctctccgatcgtcatgatgttcaggaggctagaaaaggttcactcggttctttcagagaagcagcctacctgcccccagttttatctgtacagctcagcagatcgagtaatacctgctgaatgcgtcgagcgcttcatcgacatgcagaaatccctagggcagagcgtattcgcccacaattttgtgtcatcgccacatgtggaccactacaggagcttccctcatgtctacgcagcaaagatcgacgagttcctgaagatttgctccatagctagagtatgaccagtttttgaccaacaggtattctttcgagacataggtattgctctattaccttgagaggtatatgaatcatggaatatttacccattagagttcctgaaatgatgtgtactcgttcatgaaaaatatgaaatcttgaaaagtgacgctgaaagctgaactcttagatgcacattggagccacgaatttctgctgttatttgcttcgatagccttagacagttagacactagttgcagcgtaatctgttggcgattttcagatcgcctcaagttttattcaattgtacttgtctagtgacaatggcatgagcctgtgtattctagttccatccaagatgggaacagcctgttgttgtgatactcctagtctctgtcacgccgtgcttgtgagttgttaatattctttctcgccttaatcatgttgtgagtacagtaacaattgtcttgtaagcttattgttcgactcgatttcttgatgtgcgcgcaagtgcaaaactctaattttgggtcggttaggtatacacaaaagtatgtactctcgttcatacatatgattagacaaaataattctgaatgtattttaggtactataccctgagaattagcttgattactatgggtcagtttggaagacctttttttttcgcaactcgattactatagaagtgatatcactgaatgtgcacaagtacaagcatgtacagtccaatataaggtcccacagtagcaatgccaattattctctgacggtttgatctacaattgataagccgtaaaagaaaaaacactaagcaaccaaaaacaatttatggttattagtattagttaaacttctatatcagtgtacttagcgattcaaaaatcacttgtgaaaataaattataaaaaaaactttaaattttttcccaacgtataattgaattttaaaagttaacttttagcaaccataagcagagacaatgaagacctgtttagggtaaacttttagtatctaaagattcttctagaaactgcagctgtcagaaatttcctaaacagtctactttttacttagattctgaaaatagaatcttgaaagaaacagttttgaaattctcactactcacccgctgcttatccgaatcttaacctctccaaacatagagcctatttattttgatgctattttcaaccttactaaattttagtaaaagttacaaaaaaaaaagtggctacatttagtttgctgccaaattttggtaactatataagaaatactgtcaaaattttggcaagttaccaaaacttttataactatgtcaaaattttgacattgacaaaatttagttttttttttttgcaataaagtaaacatgcccatagccttaagagtggtgcaccctgcaactgcaccaaccccctggttgccggtcaaagtcaccaccaccaacacgacccaaatcaagcgcagcactgcagcacgcaggcatcgtctcttcaatttttggtattttagccgcagcttgggctctctctccccctccacaccccacgcgcgcaacctaccccccctactcctctccattccttccacgcgaccctcgctcgcgtcatggtggtgctcgtggaagcatcgccgcgcggcggcgccggtgatcatccggcctcctgcgagctcgacgccggcggcgatgtcggcagcggcgggaggcagtacgcggccgtcgtcgtcgggggcaccttcgatcggctgcaccagggacaccacctcttcctcaaggttaaactaatcaatcagcaactgctctcttcttctcctctcgagatagtactaaattccacgaatggtgttctattgattggattgattcggaaggcttaattactctgattattctttcgcctcttcgttaacttcatcttgctgtcgttgttcttgatttctcattgacttgacgatgatgcctcttcgttaacttcatcttgctgtttcttgttcttgatttctcattggcttgacgatgtgaaagcattaatgttgattggaatttttaccgtctttttgacaggcggcggcggagttcgcgagggagaggatcgtgatcggcatctgcgacggccctatgctcgccaagaaacaggccagtatctgcaccgctaaatttcttccacttctactcctactcctctcgaatcttaaactgatccatcaactaatcatgcaattacttaagcattaattactctactggtagtaatcatcatttgggatctggcttttctttgtcatgacatggactatggtaggaggctggtgctgctgtctctgcagctgatctgatgccacagcggcatcaaacttttaaagttttttttaaagtttcagacgtgagacatctcaactcataacccaaccttaaaccatctgatacatgcatgctaattagcagctcgtagtactaatggtggtttacattacatgacacttttattgaccatgcaccaacttcctcctttgctaaattgtcctcatcgaatattactactcgataccagccaatagccatctttatcaatgtgatgcaaagaagatgaaagaataaattgttggccattcttttgctagtggaataaattgtcacccactattttgctgatcagcgtgatgcaaagaagatgaaagaataaattgttagccattcttttgttgatcaacgtgatgcaaattaagaagatgagagaataaaatcggtcgtgtttttacacactgccaacgaccaataagcaaatgtattaagcctggtttccagtgcactgagagacggcaccactcacaggaaggggtcggtgtcaaaggcttaaacacgtcatttgacaggaattaataagtaggtgagcaattctgttgtccagtagtagtagcagcagcacaccgtcgtactatgactaacaaccagaacacaagttcattgaatgtggacggatcctcaaactgcatattccctgttaagaaaacatttctgaagttgacatatggtgtatgtttgtctgctctttttctcaataagatatactccctccgttccaaaaaaatctaatcctaacttcccaatgtaaaattagtggagagtgggaataactaaagtgcccttaattattgaaaaaagtagtaagagtaataggtagttaaaggatatttatgtgataaaacctctcgttttatgtgctgatggtaggtaggatggtagaaattgattttttgtgggacaaaatttaaactctagtggtaggtaggatggtagaagttgattttttgtgggacaaaatttaaactctagaagttgagtttttttttgggacggagggagtagattttacctcgcttccgttagcacgtcttttaaactattaaacggtacgttccgtgtaaaaactttctacgtagaagttgatttaaaacatcaaatatatatatttgtcaagtttgtaataattaaaactttattaataatacactaatagcttttttattttacgtgcgctaacttaaattttgaaacatgtatgcatctgatgaacatcttttatgcttcttttgtattgcattattgcagtatgcttacctgatacagccaatcgaaaagcgaatggaaaatgttaaggagtatatcaaggtaccgacacattgcccatcaccctcccattctagtaatattctcgaactgtttctgaatattctcgaactgtcctgaatatgaagttgttaatattatctgacctaattggtttcacaaggttcgtaatccagatttcaagtagaattgccctgaaacggtgatttacaaacttaagtgcaaacttatctatataagtagctgtacatatcagttgcaagttaccagtttaccactataccgaataaatgcttcgaaacgactcttgtacagtaaaaagtccacacgaatggactatcaagatttttagtaactcttgtattacaaataacagagatcacgaactgttaatatgtggtaacaatcactcactcaggacaattgtctggaccattcttccgttagtgatcttaaggatcttgtcatcttgctacatatctggtactccgtactatttattaggcaatgatcgcctcttaccatttccagtccatcaagcctgatcttgaagttcatgtcgagccaatcgtggacccctttggcccctccattgttgacgaagctttagaagcaatcatcgtcaggttaggcttctctgtcctacagtcacttggtacactactattatcgtcttaataggatcaatagtttgcctacaactgaaacctggtactcctatgtaatattcatcgcctcaacagtggacaataaggagtaagcaatacatggaaaaaatcatttttaagctgatgttatctgtgtttaactcttggagcagtaaggagactttgccaggagggcttgctgtcaacaggaagagagctgagagaggcctcgcacaacttgaggttcagtcacaattcccatcaatggttttttttattggcacataaaagatttgcaattgcgtgataactttattttgttgcaatgctgcagattgaagtggtggaactggtgccggagaagtctacagggaacaagataagctctacagcattcaggaagaaggaagccgagagggaattgcacaagcagcagcaggaggcaccacatgaacaagcagttgaacttgagtgcagaatataaacagatacaccatcatatggtggagtacatgacaaagtgcactatgaattgtgctatatagttttgtgtcaccaatgctagtttttttctccaaactttttacaactttacatacagaagtatatagctcaagaatgctgctgccagctttgtaaaaattaaaagaaagagaaccaacattgcagcaagtacattcagttgtaagttgtttgcaggttaagttcataaacccactccttaaaatcgacccatttctgatcaatggattatgcacccctccaagacaagatagaccattcatatgctccttggtgttcaaacttgaaccatctgaaatgttagctgagagcaatattcgtgaaagtgaacagaaattttggtgagaaaatcatacatagtgcacacaccaaatcaaacacttaaagaatttataggtgtacaacaagcctcttaatttgtacccaaaactttcttctataaatgcacaagagatgctcagaggtgagaaatgagagatggcatgaggagagctcagacaattgctatactctgctcaacgaagagcttctctgggagaagcacttctcatacaagaggtgtcagaagaaagcaatgctcatcacagctgctcctactctaccaaagtatacataacaaaccaataacaagtactagaatatgttcaccaatggtatgttccccacattacacactccactacagctatgtcgaacaaaacgcctaaatttagaacacgttaatacgttatagtatcgcattacaaataatgacaggtgattccagaaaaataatgctacaaatgagtttgagagtagctgaaaaaaaaagaggagctcagagggttgctaaatctgctcaaggaagggaggcccttctcatacaagaggtgtcagaagtaagcaaatgctcatcacagcaagtagctagtctaacaaaaactaatcttagcacaaaaatcctaacacaaactcatcacagaaagtaatcataacaaaaaataatctcatctttttaatgagcgaggatgcgtgtgctcagatatatttgctacaatctgctcagcgaagtgctcctcctcatccccaaggaagaggaaagaacaacttctcatacaagaggtgtcagaaataagcgagcaatcatcacggcacaatccaccaaaaccacaaaaacaaaaatcattcgaaggggctaaaaattcgaacaagatcaccgtgcttgctgattcgacgcaaacatcaatcagaccagcagcctatccctgttcctcgcggcaccggatcagaatccaaatcagaaaaagaaaaaaaaatcaaacgcaagatgcaggcaacgcccgcggcggcggcggcggcgattgaaccctagcggaggtgaggcgagcacagagaattgaagcgtttatagaggcggaggtccaaggtttagatgggccgtgtgggcctttctgtttaattagtgatgggccttgaaaatttaatgggccggcctgcttgatctctctcgaagctgaaatggttgacctttttaggttgaccgttgactctgttcatgaaggagttttctcccagcaacataaaggaatctggatcaagtctaaccctctgaagaaagttaaaacttgaaacttatctccaactccaacctgtttaaacagcacactttctagaagataacttatgtataagctcgatcaattcaacttttaaagtagggaattgactgtttcaatacggacgccactgcttcattgggagtatttcaaaagcccagccgcaacagagatgcagcagccagcagcagcatgagaagaggaccggaatccggaaattgaactagttttatacacccttcgagaatagtcacgccacaccagacaccacacgccgtccggtcaataccatgttcggctaaagttcgtttggtttgaatagttttggatttaataaatggaaatttaatcttttttattcatgatcgtaattttcttgatttcgaaagaattaaaccacctgatatacttacagcctcattggttgccctattaaatcaaagtcaaagtcaaaatttaaatttttaaatttaattttaaagttagttttaagatatgtctcacgtagtttcttttgaacattaactttttatttattaagaatacatatataaaagttatatatgcaaattaatttttattcggattcttaattaagcagtagcggctaaccttactatagctagtatttactacagaattctatctcaatttttcttaattacatggaattttagtggattatccgctgacttgcccgaggtcgtcgggcgatgcatccgccgctgtagttaagggaatatgggcaaccatgcactagaatgaaaaaacacagatcaaccttaaaattgaattttgcaattcaaaatttggttgtggccgatgagataacaaacacatgtagattaacatctccagattaatttagtaaccaaaatccagattaatttagcaaccaaaagctgttcaaagataagggacgcgcttttgcatacgctggggtgtggagtattcctatttacgcatgtgtgaataggctgcaaatgcctgtgctcaatggaagtttcccatggtcgaccggtctttttcctcgtgcgcggccgcgaaatttcgtctgatccaccacctcacgaaccaaaccagatccaccatgattaacaaacaattcagcaaagtgacaaaaataatcgctaatagtaccagtagtacattgcgtatgcagccagcagctgatgctttgacagattctgagacaaaatcatctctcaaatttcattcctctctttttccatttatgtacatgataaggttctagtacaaacgagaaatctcgactcgaatttcgccgaaaattttgaacacttttacaacaaaacaattaatttaacaacaactaccactagtaatcagttggtttggttattgaccaagtgattaaactaataggcggtgtggtgttgcgaccggccgagcgcgaagaggccgctgaacgccggtcggtacgtcaggtacgaggcttgctgcggccgccggtcgccgccggcgctggccttgctgtagaagagcctgtgcgcggtggccatgtccatctcggtgaccacgcccttcttcgccgccggcttcgtcttcacggcgctctgcttcttctgctgtggttgttgagggggaggaggagtcttcagtttggatgatggcggcgcggcggcgtggtggtgcaggaaggcgaacttgtccttgccgtcgctgcgggagcggccgccggcgccgacgaggtcgcgcaggcgccagcgccgcgatgacgacgacgactctccgccggtggacgcgctcttggggaacctgtcgcggccgggcgagcccggcgccgagcgcggcgtccacgcgcagtaggtgtcggcggagggcgccgccgtggaggcgtcgccgggcgagaggtcgaggaggctgcggtcgaacaccgggtacgccggcacgatgcggccgtgcgcgaagatgtcgtcggccggcgccagctcggccgccgacaccggcggcgcgaacgcgaagtcgaggtcgagcccggcgccctccgcgtcaccaacgtcgaccgacgcgggcgtggcctcatcgtcgtcgacgccgtcggcgccgcggccgaagctgatcagcgtgtggaggctgcgcggcgactgcgccatcgcggctgcggcggcggcgctgggtggcatcacgtcgtcttcgccggagacgagaggagaggagatcgcggggtggagtggagtggattggattcgactcgacgcgctcgatgttggtgtggtgtggtgtgtgagacaaggtggttggagtttgaggtttataaagggaagggaatggtggattcacgcgtgacgtgacgcggcgcgggagtggggagcaagaaactactacaccctcggtttcaccgtatattctatatcaaacgtttaatcatcatatcttatttaaatctatttaataattaatatttttattgttattagataataaaatatacgtagtattttatgcatagcttatctttttaaagttttttttatatattttttaaaatcaaacggatgattaaacattagatatataaacttttaaataaatttattttagaacagatagcgtagattatagaatagaaaaagtgcgagctatggaattggattcgatgggtggctagtactagtactagtagtctgagttgccttgcaagggaagaaggcaagggcgacgcgagcacgcacgcacgcacgcacgcgtgacgggtcgcccctcgacgcggggacgcggtctcttccctcttccctcggtagctggctgtcgtcaaggcggccggcaccggtagctaacggcatgagtttgttcttctcttctggattaaccacgcgtgcgctcgtgcgcgtcaaggcataaaaccagcgtaaaacatgttctcactgctgctgccctgtcccaaaataagttcaattttactcgtcgtgattcaaattgacctgaagagaaaaaagatcagcgtctctttccaaaaggaacacggccagcgtttacatatgtacgtgcacactaacaccccatctttttaataagctcttctaagaaactagcatgacatatctaattgacatatcattgtggacggatatatcgtctagcactgaaaaaattagctgtaaatacgagcaactataccaagtatttgtgagtttgtagtcaagggatattactttatggatcaggatagataaagggttataaataacgttattttggaacaaatatcagtctacaaatgaacttattttaggaggagtgcgtactttaaccgtcttatattataatacgatttaaccttttatataacttctttaaattttgatcaaaattacataaaaatataaaaaaagtttaatgccgaataaacacacttgggtttaacaaaactatttttatcttataagagttttacattttttctataaatttaatcgaacttatagaaattgactttttaaaaataggttgacggagctcgtggcccctcaccgggagaccgcgcaggcccccctttgccggttcggccgggggctcagggtgagatctcaagctctctctgtagatgacggcaagatcgctccctctcaagagaacatgaaacacaagcgatgtatacaggttcgggccgctgagaagcgtaataccctactcctgtgtttttgtggatctgtgtatgaaggagctacaaagtgtgagccgacctctccctccttctaggcactcaatctggaaaagaatcaaaagatcccctttctatgggcaaggtcctccttttatacttcaaggggataccacatgcacccttctctttccaaactggacttttcttctttacataaatggacggagatttgcacggttgccttccgaacgtccttctgatgggacggcacatacctacctctacttctgccgggggcaggcgcgtcgtgggaacgtggctgtgtgccgacgacatgagcagtgtcagaccggtcacaaatcggtcattcttgtccaccacgcgtcagcttagcaacgtgcatgtttgcccttcttcacacaacatcttgcctgtaatggttaggatgaagcctggtatatatcgatcggggctaacgtgccatctctgggatgtaacacgctagctccagctggggacgagtgcctagaagctcacatcttgacgggatggggcaaagcgtgcgtcagaccgcctgtcgccacctaacccgcgatttgaccggtctgtgactggtcacagaccggataatcgagtgcactgcactgcacttcgtgcggcgtgacacgcttagccgaggcgcaataaatgcggttaggtgagccctgctgtgctcacccaacctatgtacatagtgcaaaccccacagggggtcggggcacctcggccctcggggccggggcaggaccaacccgaccccccctcggggaaatcaggaggagggcggacacctcaccctcgggcccgacgtccccgaaggtgccaagccacgtgggcgattccatctgcctcaagcctccgggcgcaatactcccggtcccatatcaccgacagtagcccccggcgttatgtcagggcaatcatccttctcaagggaagcggtcgggcatgacgccactcataaagcctggtgacaggtgggaccggtctccgtgattgggcagaaacccaacggtctcaaaccacgcatatcggtaacggtgtcttggccgtcagtcatgggcggtctcttcaagactgccacatcacttgagcagcgctcgaatctgggcgtgcagattcgtttcgtctggagatatggtaacgtcgcttcggtcggcgagcgtaattaacgcacacacgatacgatctatctcgactgccacaaccgcatatccacctcatgcgccacaagcgggcgaatggaattagtggaagcgtgggcgcgagaaacgagggagcgagatagcgagtaacgagggagcgagatagtgggcatgagaaacgaggagccgggctcagcgatggcaagggtataaagccatcgaggaaaggacttgctcccttcctttcgccactattcccctttccttcgccgtttgcgccctaaactctctctttgctgcgcctcaccttcgccacacacactcgttctcaaccctctctttctccgacgacatggcacggggctccgctctgctcgacggtagcgtactaccaccttcccgcattgtgagcgagaggcaggctgggctgccgcgccgcttcatgccggaatccgccaccggccgggagatagtgatgctgggcgaggcgcgcccagcaccagattacccggggcggtccatcttcttcctccccttcgcaatggccgggttggttcctcctttttcttctttctttatggatgttctggagttctacgatctccagatggcgcacctcacccccaacgcagtgatgactttggccatcttcgcgcacctgtgcgagatgttcattggggtgcgcccatctcttcggctgttccggtggttcttcaccgtgcagtcggtgtcgccgccgtcggtggtcggtggttgctacttccagccgcgggggccggtgttgaaccgctacatcccctgcgccctccgcaagaagtgggacgattggaaaagcgactggttctacaccccccttgccaacgaagcgcgcctccgactcccaaaccagcccccggcgccggtctccagctggcgggcgccagtagatctgggggatgactatgacgccgtcctcgaccgcctggcgggcctgcgatctcaggggctcacaggggccatggtgtacggcgactacctccgtcgccggattgcgccgcttcagcggcgcgcccggagcgcatgggagtacgccgggtccgaggactacatgaggacccaccggggagtcagatgggattgggctcccgatgacttcaagatcgtggtccaaagggtgctgaatctcagctccgtggaggcgtctcttattcctcaaggactcctccccctctgctgcgatccagaccgcgcctccattctgaccatcatgatgggggtcggggcctcagaggaggtggctcctaagggccacgatggcgccggcgggagccgccaggaagaatcaaccccaggagggggccgtgcttctgggccccgcgacgggggctcggggagcaactgccctgccgccgcccgggggaagaggaaacagggaggaacacctcccccatctcctccccgagggggctgggcggtgcgtgccagcagcaggcgcccggagggggccgcgccgacatcacggcccgagacggagcgcaagaagaagcggctccgcaagacgggggagacggaaccatcccggggaaacctgatttcccctctaaggtggtcgttcaaccgaccccctcgcaggttcgtttcacgcctttcacaaccatcttccctttatcccaatcagcaagttttctcttatccatcctgtttgtcttccggtttttttcttctgcttcagcgatgtcccgtcgcgttcctcccgccatcccaagtccggccaatccgaggccgaagatccggcggccgcagaggaacggaggcgagaatctgaccggcgagaggccgcagatcgccttcgggaagctgaagaggccgcccgggaggccgctcgggttcggcaggcggaggataccgctcgggaggaggccgcccggggtcgccaagccgaagaagctgctcgggaggaggccgcccgggctcgtcaggctgaagaagccactcgggaggaaaccgcccgggctcgccaggctgaggcgatggcgtcttccgaggcggttcacgacaagaccgccggcgcgtcgctcgggcccactccctcgggtgacgctcaggcgacaacctccggggcggctcgcgacaaggccgtgggcgcatcgcctgggcccactccctcgggcgacgcccaggaccaaacgggtccgggggacatccccgagctcagtgcgtcttcaggcgggccgagccgcgtcgcattttctccaaggcggctcttctcctcgtcttctgccgccccactgagtgccgagccccttctgcaagccttggccgccgcaaacaccgcggtgctagatggattcagcgcccaggtggaggccttgcgagcggaacgagcggagctcgaggccgcatgggcgcgcgtcgaggaggggcggcgctcggtggacgccatggtggaggtgggccgtaaggctcaccgccgccacatctcggagcttgaagcccgcaaggcggcgctggcggagatcgcccgagaggtggaggaggagcgagaggccgcccttatcgccaccaccgcgatgattgaggcgcaggactccctccgccttcaacacgggagctgggaggcggagctaaagaaaaagctcgacgccgcccagggggtccttgacgccgccgctgcccgagagcagcgagcaacggaggctgaagcggcgtcccggcggcgcgaagaggcccttgaggcccgtgccatggcgctggaagatcatgccggcgccgtggagaccagcttggcggaccgcgaggccgccgccgctatccgggaggcgacgctggcggcgcacgaggccgcctgcgccgaagaggagtccgcgctccggctccgcgaggacgcgcttgctgagcgggagcgagctcttgaggagtccgaggccgcgacacaacggctggcggacagcctgtccctccgcgaggcagcgcaggaggagcaggcgcgccgcaatctggaatgcgtccgcgccgagagagccgcgctggagcagcgggctgctaacctcgaggcgcgagaaaaggagctggacgcgagggagcgcagcggcggggcggctacgggcgaaagcgacttagtcgcccgcctcgcagctgccgaacacaccgtcgcggacatgcagcgcgccctggactcatccaccggggaagccgaggccctccgcttgtcgggtgagatagggcccggcatgctttgggatgcagtctcccggctggatcgcgccggtcgggaagcgagcctctggaaaggccagacaatttcgcgctccaccaatctggaaggtctcgccccgcaccttaggaggatggcctgggctgtccaacaactccccgaggaactcgagaagaccatcaagtcatcctcgagggacctcgcccaaggagcggtggaactcgtgttagcgagttaccaggctagggaccccggcttctccccatggatggtgctggaggagttccctcccgggaccgaggacgatgcgcgcgcacgggtccgggatgccgccaaccacatcgtccaaagcttcgaggggtcggcccctcggctcgcgttcgcccccagctccgacgaggagggcgacgccagcggtgaggacgacggtggcgacgaggccggcgacccgggcgcattggaatgagcccccaggcccccaccaatctccaattttttctttttctttcttcttttcgtatagatcaacttaatctgcaatcaaaaatgatgaaaaatttctatgttaactttattttgctatgcatatgagttgaggatgatttgtgccgtggtccttttgcattttagcttgatttaagggctcgtgctcaagtcccgatcctcaaatggctcgggtcggggctagtgcctggggagatccacatgtcgagactggccaggccgggaacatggtgaccgagggttatgggtgacccgattgtgggtttttgccgattcccccccggagttcaccacgccccggggcacggctcggttctgggccccgcttggcgattttagctgaccgaaccgagcccccgagggcaaggttgagcacgagtgaccttatttcaagttaagattcttcagaaggaaaaacggcacagacacaacctttaggaaattgaaactgcttttattgaaatgctgaaataagaaatgtaaggctgtgcatgtgtggtagcccccggctaaccctgcacacccgaggggggtgcggggttagcccgagcccgaaacctgacacccgacccccccccccctcccctcaggggtagaagcgacgaaggtgttcgatgttccacgggtttggcagctcagtgccgtcgcccgtggccagccgtacggagcccggccgggggacgccgatcactcgatacagaccctcccacattggtgagagcttgctcagtccagcacgcgtttggacgcgacgtaggacgaggtcgtcgacgcagagtgatcgggcccggacgtggcgctgatggtagcgccgcaggctctgctggtagcgcgcggctcggagggccgcgcgccaccttcgctcttccaagtagtcgaggtcatctctacgaagctgatcttgatcagcctcgcagtacatggtggcccgaggagacctcagggtgagctcggatgggagaaccgcttctgcgccgtagacgaggaagaaaggcgtttccccggtcgctcggcttggtgtggttcggtttgcccagagcaccgctggcaactcctcgatccatgaatcgccgtgcttcttgagaatattgaaggtcttggttttaaggcctttgaggatttctgcattggcgcgctccacttggccattgcttctggggtgggcaggtgaggcgaagcagagcttgatgcccatgtcttcgcaatagtcgccgaagagttcactagtgaattgggtgccattatccgtaataatacggttaggcactccaaaacgggccgtgatgcccttaatgaatttaagagcagagtgtttatcgatcttgacgaccggataagcctcgggccacttagtgaacttgtcgatcgcgacatacagatactcaaacccgcccggggcccgcttgaacggtcccaggatatcaagcccccagatagcaaatggccatgacagtggtatgatctgcagggcctgggccggctgatggatttgcttggcgtggaactgacacgctctgcatcgccggaccagatcgactgcatcattgagagctgtcggccaataaaatccttgacgaaaggccttgccaaccagggtgcgcgaggcggaatgggctccgcattcgccttcatggatatcggcaagaagctcaacgccttgttcctgaggaatgcatttcaggaggattccgttagccgcgcgccgatagagggtcccttctatcagcacatagcgtttggaaatgcgttggacgcgttcactcccttcgcggtcctcaggtagagtcttatctgtgaggtatgcttggatctcagagatccaagcaatcaatctaagggtgcttggagcgctcccttcgggtcccgagacctggactccggcgggcctcgggggccggtcaggcgcatccgtctcccctaaggggtcgggtcgcgccgacggctgggtaagcctttcttcaaaggcgcccggtggggtttgggctcgcgaggacgcgagccgtgagagttcgtcggcaaccatgttatcccgtctgggtacatgccgaagctctatcccgtcaaaatggcgctccatacgccgtacttggcgtacataagcgtccatctgtgggtcagagcaccggtattccttacagacctggttaacgaccagctgggagtcgcctaacaccaagaggcggcggatccccagtccagctgccaccctgagtccggcaaggagtccctcgtactctgccatattattagtcgctcgaaagtcgagacggaccaggtatctgaggacgtctccgtttggggaggtcaacgtgacccccgcaccggcgccctggagagacagagaaccgtcgaactgcatcacccagtgggtggtgcgaggcagctgagaggggtccgtgctagcctcgggtattgagacggtctctggagccggggtccactctgccacaaaatcggcgagggcctggctcttgatagcgtggcgtggttcaaagtgcagatcgaactcagaaagctcgattgcccattttaccactcgtcctgtaccctctcgattatgcaagatttgcccgagggggtaagacgtaaccacagtgacccgatgcgcctggaaataatggcgcagtttcctcgaggccatcagaatagcgtaaagcatcttctgggcctgagggtatcgggtcttggcgtcccggagggcctcactaacaaagtagacaggccgctgcacccttcggtggggccgatcctttctgctaggggccgtatccccagggcgttcttcgttcaagtggcctttcggggcgcacttgtcttctgtgccgatgacctcggggtcggaggatgaaaggggcggccttccctcagtggcctcggggccgtcctgggggtcgggggctcctggcatcgtcggacaagtgggcaaagggccaactccggtcgtcaggggcctctggcctccgttcggctcgggggcctcttctccctgctttctcccgggtcgagtcagcacagggttagcctcggggccaaagggcgataggtgcggccttcccgcagtggcctcggggccctcctgagggtcgggggcacctagcaccgtctgacaagcgggcagagggtcgactccggtcgtcaggggccgtaggccaccgtccgactcgggggcctctcctccccgctcgctcccgggccaagttagcacagaatgggggtgcacgaaatgaggattgtcttcatcgcgctccacaaccaacgctgcactaactacttggggggtcgccgctaagtaaagtagcagggactcatttggctccggggcgactagaaccgggggagagctgagatatgcctttaactgagtgagggcatgttcagcttcctccgtccaagtaaacggccccgagcgcttgaggagcttaaacaagggtagcgccttctctcccagccttgatatgaaacgacttagggcggccatgcaaccggtgacgcattgcacatccctaagtttgctgggggggcgcatccgctcgatagctcgaatcttctcggggttgacctcaatgcctcgggcagagaccaagaacccgagaagcttgcccgcaggtacaccaaacacacacttatcggggttcagctttatgcgggcggagcggaggttctcaaaagtttccgctagatctgaaagtaaagtttcttggttgcgcgtttttacaaccaagtcatcgacataagcctcaacattacgtcctatttggctacccaaagaaattcgagtagtacgttgaaaagtaggacctgcattctttaacccgaagggcattgacgtataacaataggttcctacgggggtaatgaacgcagttttttcctcatcctccctagccatgcgaatctgatggtaaccagagtatgcatctagaaaacacaaaaggtcgcaccccgcagtggagtcgacgatctgatctatgcgaggcagggggtaaggatccttaggacatgccttgttaaggtcggtgtagtcgatgcacatccgaagcttgccgttcgccttgggaacgaccaccgggttcgccagccactccggatggatgacttcacggatgaatccggcctccagaagtctcgccacctcctcgcggatgaaggcttgacgttccggggcctgccgccgcactttctgccggaccggccttgcgcccggccgcacggcgagacggtgctcaatcacctccctggggaccccgggcatgtccgctggtctccatgcgaagacgtcagcgtttgcccgcaggaaggagacgagcgcgtcttcctatttgccatccagaagaccaccgatccgtgtggtcttggatgggccgtcgcccaaggcaacctccttgaccgggacctcgtcgcatgtggcaatccgctgcctcggggcggtgggggcggaggtgccaagcctctcgtcaccaccctcgggcttggtcgcagcagcgaggtggtccgcgcgctgctccatgcaagcgagcgcgactttaaggtcgccacggacagagatggggccaccggggcccggcatcttcatctggaggtaggcgtagtggaccgccgccataaacttcaccaacgcgggcctccccaggaccgcgttgtagggcagactgaggtccgccacatcgaagttcacccgctccgtgcggaagttggctgatccaccaaaggtgaccggtaggtcgatgtgacctaacggccatgtgtgccccggcgtcacaccgatgatcggttgagacggctggagcaccatccccggggccttgatagcatcaaaggccgcgggggaaaggatgttgagagccgctcctccatctatgaggacacgccccaacttcacattgcagatggtgggggaaaccaccatcgcaatctgccctccccgggcaacgcacggtgggtggtcggtctggtcaaaggtgagggccacctccgaccaccgcgcccgacacgtcgcctcatgagtaggggccgcggccagaagctctcgcttcatagccttgaagctccggcgagagatgtgagcacacgctcccccatcgacagtggcaatggtggccccaggttcttggaaacctaggtcatcatcaccgtcatcgacgtcaacagcgggggccttctgtttggcctcacttcgccgtttgccggaaggaaccgccggggacttaccttcccggcgctcctgcctcctgtcctcctcccacttcctcgttcgctcagccaagtttttgactgcgcgacagtccgcgagatcgtggagggaggtgttgtggacggagcaccacttgctggctgggcgctccctgctgggagtaccagcctctttctttttgtcgctcgcaggcctcccctttcgggtggcccgcggagcgccctcgacggcgaggacgtgaccctcgtcgccggaatagactgaccttttcttcctcctcctgtcacgccgccctgtctgagcggcggatccgggggcggccgaagctgccacaccggaaccggaggggttccaggtccaggcctcctccttacgagccactcggtccgcgagctgaaaaagctctgcggtagtctggggctctttggaggcaatcttttcgagcatgcggttgtgtcgcacaccccccctgaacgcgtagatcaccgcgtgtgcagggatgcaaggtatagtattgcggacttggcagaaacgctgaatgtacgagcgaagggattcatcatcccctcgctgtactgcgtgcaagtccgcttcttcacctgggcgtggataggtgccttgaaagttcatggtgaactgctggcacagatcctcccaggagtggactgacgcgggtggcaggttcattagccaaccccgcgcctgtcccttcagggccatgggaaagaaattcgccatgaccctgtcgtctcccccagcggcctcgatcccggtcgtatagacctggagaaactcggtggggttgacgctcccatcatacttctcggtgatggtgggccggaaccttgggggccaacggacattccgaagactcgccacaaaggctctacagccaacaccaccaaccgggggcacggagggctggtcctcacgtccatgtcgaggtgacaccctggacgaagaggcaccctccgttgcgcggggagcacgccgatcactacgtcggcgttcgatgtgaaggcgggcatccggctcttcatgctgatcctcccgagtcggaggcgccgacgagggagtggtagccgaatggcgtgcagcagccgccgctcgccgcgccctccgccttgatgacacagagccggtggtggcggcggcggaggtcctggtggtggcggaccgttcaccagcacccaggcgctgctgtgccgtcatgaccaagttggccacgtcgtccagccatcgctgggctggagactccgggtcagggacgacgggcgggtgacgtaggagcgcgccagcagcctgaagcgctccctggggcgtgctgccgtcaccgtagacgaggaggcgacgctccccgtctcgccgctctcctgcatcacctgcgactggtgatgctgtgggtttttcgaccctctcgagcgcctccccccgcttaggactttggcgtggaggaggtgggggagtacgagctcgacggcgcgggtttggctccccgtcgtcgccgctcacactcggagagaggtcgtgcgcctttgcttgctcggccattaggctgaacaagggaaacttggtgcacacggaagagtatgagagctcagaaaacacacgctgagccccctacctggcgcgccagatgacggagctcgtggcccctcaccgggagaccgcgcaggcccccctttgccggttcggccgggggctcagggtgagatctcaagctctctctgtagatgacggcaagatcgctccctctcaagagaacatgaaacacaagcgatgtatacaggttcgggccgctgagaagcgtaataccctactcctgtgtttttgtggatctgtgtatgaaggagctacaaagtgtgagccgacctctccctccttctaggcactcaatctggaaaagaatcaaaagatcccctttctatgggcaaggtcctccttttatacttcaaggggataccacatgcacccttctctttccaaactggacttttcttctttacataaatggacggagatttgcacggttgccctccgaacgtccttctgatgggacggcacatacctacctctacttctgccgggggcaggcacgtcgtgggaacgtggctgtgtgccgacgacatgagcagtgtcagaccggtcacaaatcggtcattcttgtccaccacgcgtcagcttagcaacgtgcatgtttgcccttcttcacacaacatcttgcctgtaatggttaggatgaagcctggtatatatcgatcggggctaacgtgccatctctgggatgtaacacgctagctccagctggggacgagtgcctagaagctcacatcttgacgggatggggcaaagcgtgcgtcagaccgcctgtcgccacctaacccgcgatttgaccggtctgtgactggtcacagaccggataatcgagtgcactgcactgcacttcgtgcggcgtgacacgcttagccgaggcgcaataaatgcggttaggtgagccctgctgtgctcacccaacctatgtacatagtgcaaaccccacagggggtcggggcacctcggccctcggggccggggcaggaccaacccgaccccccctcggggaaatcaggaggagggcggacacctcaccctcgggcccgacgtccccgaaggtgccaggccacgtgggcgattccatctgcctcaagcctccgggcgcaatactcccggtcccatatcaccgacataggtggagcatcctgtaacctgaaatggagggaataaggcccccaacatttggcgacatatttacaaatgaaaagtaatttgtgaatagaacttttttatacatgttcttagcgatcaaaatatatatttgtctttttatctttttgtgtgggggttatttttgtaaatacatgctatctcactaagtcagatccgtttgcccgcatcgagtcagaaactaaatccgctcggctcgcatgggcgatcaccgccactggcttctatcggcagcgcccctaccgccgacagccacaatcgccaccccaccgagagccaaaattggtgtcgccgccatcggaaattgattcgagagacaaggcgccggggacgcgggagacgacgggtgcgtggaggatcggcttctcccggcgccggaggaatcgggagcgaggtgcgccgggaggctccgtcgccagggatgccagacgaaacaaaaaaaagaagcgctaccctattcgtgacgatatccacaacagaaaaaacacgggcaatataatccctattcgtgattaaaaaaacaaaaacaatctcttttttaaatttccaaacaacccttttcagaattttaacaaataccaaatctaccctcatatatactgacgatatatacttatagtagaatgtaccgtaaaagtcttcaatgaaaaactcccaaatcaactctgaatttataaattatgactgataagtataagcataagcataagcgaaaatacgatgatactgatgatatgaagatctcgtttttggttttggaagttcaaaacgatcgatctaatccgatgacgtggtggtcttgaaaattcattactctaaaactctgaagcaatgtgaggagaaaaatacaaaacagaggggacgcagcgttgatggcgaattgacagaggcggaggacatcggacactgggaaaagtgatctgatcttccaacgcgtgatgtactgtatatgaagtttgccagggttccctgcactagacacccatctgtgattgtgaccatcaatcaacttaccaacaggtcgaagctgcactcaattgccatttgccaatccatcgaatccacacgaaattacgcactaccagttggcgcgttgccgcttggctcggctagcttgatgcccaggccgaccgtccatacgtgaacgcgtctttttcagtggacactatggtttctgcacagtgccatcgattccatcctagttgtatcatacaaatccacaccacaaataccaacattgcacatgccacacacgacggaacaaaataccgaagatactagagtttgttcaggcacgacgacatgttaattggacagtacagttgaatagctgatgcatcatgatcctactctgttatactgcaccactatccaacttccaaagctttactctcacatgtacagtacagtgccatcgattacagcctagttgcatcacgcaaatccacactacaatagcattgttgtatttgtacatgccatgacttataaacgacggaacaaaatactaaagatactagagttcttgttcaggcacgaccacggcatgttaaatgtacaggacaagttgaatagctgatgcaccactatccaactcacaaagctaaaactgtgtcactactctcagatgctattttagactaccaggtatgccccattgtaaggtaaggttcactgacacgggtaacagtaccacatcactctacatcaacactgttttgcacagcattcaggcaactcgttttatggaacaagcgccaacggaccactattcttcttcgtcgtagcggtagcggctggcattgtcatcttcatagtggttggcgttgtcctcctcagggttgttcacgcgctcgcattcgtcgatccattcgctgtatctgcgatgaagaagttcgatgagtttcggggtgtgtccaccaacagttcatctgcacgagcctaaatagatggttctcaagactcaagagcaaacttacatgtcgatgggttcagtcagagctgcagaaaggaggaaaaaaaatggtcaagtcagcattattttgttcagatatcaaatggtaagcatttacagaggcaattgcatcaggcgtattgtcttcctaaacaaacctaatcttggacaaacagaaggaaatttctgcaattttagtaagcaactaagagggaattgcgttatacatactgcctacatagtcttgtggagttcttatattatggttatttcttttccaaaaggactagcgaggatgttgcctatcattaactaggaagggagacatgaactcaaatgacaggtttggagggcccacaaaatctagcctgcaggcccagctaactgaacaaagaaagcactaacgacacgtaggcaaatttatactcctgccccaatgcagcagtgcaatactagtacaaagcatgaaaaacagttatcaactataaatggctaagataatcaaaaggtgttggaacttggaagcacagatgctgaaagttaagacctgattccccaaccttttcattttggttttgcagaggcataagttatctacagatgattaaatcttattccaatttattataaagaaatgtaagcatgacgccaacagtaactaaccaaataacctaaagagagaacacaaagcacaattatgctcgattgcaaagttcacaacaggaaaaggggtcacttcaaatactaaaccactgatccaaaacgaatggccacatggttccagagcatattaccattaacagatgtgctaaaagtttccaaacaaattctgcatgaggcctcgccgattaagttctttagatcactgcgaaacacagaagaaggtgtcactgcactgccaaaaactagcacggacagagaaattcaagagaaacaaaaagccaggtatgtgaatggtcacaaaacatacttacatgcgacactcaacactacttccgtggttgcaaaatggacagcaaaagacagtatcaagcttgtccattctcttcttgggaggtggttttgctttggacttcctcttgcccatgattcaacgcttatttttcccgccttttgcacgtagttcaaaaatagtaacaattgaattatattgatgctgtcatatttttgcgccacaaagagacaaagtctccactctcaaaagttacagcatgaaggaaacacatagaagtaaatgatactcaacattgagcacacaatagagatgcaaatcagcacatgcaatttgagatatctcaacattgagcactaatatgcagaacaaacatcatcctatagatttgcaatatttttcaatcaaatcacaaggtgttgttggttcaatgcaacaatttagcatctatacaggcctcctaaagtcacaatctaagttgttggctcaaaatttcaaatgcacagcatatgcccagccaaatgataatagaagcggcaattaagcatctatacaaaccccctcaaaatcacaaccgaagtcaccttttaagaaacctcacaatctaagcatctaacaacagcctatctgcttagcttcgattatcaacttcttctcttttttttttcttaaagaattcactaaaattccatcaagcggttgcacttaaaatagctctgaccgtacccaaaacccccaaaaaccctctgctctgaaattccctaatcaaccccagcgatttcatgcaccgtgagtaaaatcactacaaaattctagcagcctaagcacaaacgaacagcaaaatcacaaatactacctcgcgactcatccgcatctacaagcatacctaacctaaaaacctaaaccccttaaaaaacaaaattccccaggacaatcgatcgatcaaagcgaaacactcagctcactagcgcagcagcatccaagcactccaccccacatcaccgaagagtaaacgagatagatagcgagcaggagagcaaatcctagctacgcgggagggagaggaggcgggtggcttgggttacctcggcgagcggcggagacggagacggagacggaggcaaaacggacgacgaaaccggagtccagaatgatcgcgaccgacccgaccgcaacccgcaccgcctgatttatagacgctgcagctagcagtatgggaggcccattgcttagtgggccttgggcccatgagtgcctggttcgtataaggccgcaattgtggtccgtacacgcgtatgggctggtgtttcggcccatcgtaacggagatggaagcccatgctgactcggtcttattgggccgagatggaaataaatgggcccattacgtcgttcatttgatactgcacgaaacggcgcctcgtgagaaagcgaacagtacgtgatagcgataagtacagtgtcatactcatttatttggatataataaaaaaattggcgtttttctttaaagaaactatggctaattactcatagcttaattacagagattagagacgaaatactgcgaattatcatagcttaattaaaagcaataaagccacttaggctatctacccaaggacacagaataaaaccacgatctatatgtttacagtcattgctttacagtgttatactcctaacttacaatcccaggagtatcagagtagtctgtggtgcccggtagtggtaggtaagtgtgttgttctttagcatttttctatttttcctcttcacactttatttggtcaacgataacgaaaaggctaatactagaatcctaacgacatgatatggctagtatctagcttgatgtactgttgcaatcacagaatataatttggaaccaacccaatcaaatcaatcatacagaatcctatcccctgagttttttttatttgccatttgagtgtttttaatatgcatgtttgatcattatttcttcatgggatcgttactttttaaactaaaatattcataaaatctattaatgcggagtattatttttacctatcaaattcacatccacttttaaaagtttgagtcgatcttgttttaaatgacaaatatttatattcggacgaactaaacggatccatgatcatatgtgttttggttataagatactccctccattccaaaatataatggatttgaggtggatacgacatatcctaataaatcaagtttcaggccctgtttgtttcctctaaaattagaggataaacttttggattaaaatgacacgcttttcaaactgctaaacggttatttcgtgcaaaaactttctgtatgaaagttgttctaaaatatcagattaatacatttttcaagtttgtaataattaaaactcaattaatcacacgttattaccaccacattttccatgaaacacttaattttcatcttcatctttaggagattcaaacatcaccttagagcgagcaggtaaaatagcagactataagtcagctgtaaacatattttaagaagataaaagaggagagataaaagtggcgggctacagatttgtagccagctgtatcacggacttaagacgcatgtgtgtatgataggtgggaccagatattgattgtgtaatatatttttataggtaactattgtatggattggctattaaattgactatatatgatttgaagtcaacaattggctatattaatagtatagccaactactagctctaattcatctatagctaatctaataactcattcatataataattacatactacactattaatacctggtccccctgtcatccacacacttcgtcttggaattcgtgctacagctggttacaaatatgtagcccgctgcttctcttttttctcatttatctttttaaaatatatttacagctggcttatagcctcctattatatccgatgttagtctcctcctgatagaacataaacacaagctcagaattcaataaatccaatcgtgctgctgcctgctggtcaagatacggtgggtggtgcatttccattccaatttccattccactggcgcgcgaggaggtgggtgggacctacccatgattctctgggacccgccgatgagccgccgggagaaatgcgccggccggcgtcacctgatctgatcttcccttttcgtggtgcgagtgggaagcgtccaaatctgatcctggaatcttccgcttttccgctccattacatcacgacggccgccgcagcagtcaaagaccacttctttttttttcctctttgtattttcttttacgaagaaaaaaagaagccgccgccgcagtaggaactaggtagaggatgaccacgaattccaactgcagacggaaatgcagacaccatggtggaaataactgtgtaacctctgtattaacactgttgatttttttttgagtattcatatattttttacatgtaaaaaggtttaagtcacactgtactttaaaaatgtttaatgataaatcaagtcataataaaaataaataataattacataaatattttaagataaaccaaaggctaaaacatattatagtccatagtgtagtaagtatacggcctcatttttttcgtttatatttatgtttatcagccaaaaattaaattttcaatcttaaatttaaaattatatttaatattttctcattaaagtttattttctagcctttgattttagactaagaatgcatatataaattttatttataaattattatttttaaatatgccggatctatagtctaccggcggcggcgatgtggcgcctcggggtgcgaggaattttcctcgcctttccttttctttccaaggcgaagagcactttttggcttcttttttttacccacccttcctcttcttctcttctctcgcccaaccaatcgccttctcggattctcctcctccgcaagcccagccctgacgttgtctcggacacccaaaggctgtgtttgatctccgcccgccacctgtcttcctcctcctgctgcgcgcgcgcctgcttcttcttcccgttgagccagagagcggttcttggtgcaggtgaggcaccaagatctccctcttcttcctcctgcgattcagcgaaatctttaggtaggtaggagtaactccaagtcaatgtttttctttccctttttttgttgttgttgttggaattttcacatgtgtttggcatgatctcgaaacagcagcgatctttgtatgatctccatgtttgttgggatttggtgatgtgatattgtgatgtgattcatcgggatcttctcctcctttttcgtctggtttagatgctgcatctgcatgcgtgctcgctgagaaatcccccgtttgttttcgctcatcttgatctgtgtctgttgctttcgtctcgtcttgtgcagagccggggatggcggctctgatgaacggctttgggagcctccaatgcaaggcgacggtgcatgtcgagaaagggcacatgcaagcatcggggatggccttcttctctcccgtcaacagatgcgcccaggttcatatctccaggtgatcttgattcttgcagctctcagattgtctttgtgtgtgcttgtttccaaatgttcatcagctttatttttggtaggaagcacaacacttcggttttgctgcttacaagaatttaccttttgaaaagctgatgttttaaagtcctcatccttctttgaccctgaattttgcctaaagaagttctcttggggtgggtggggggaatggacgctgatgcttcaaaaatgggaagaacatgattcagctaggagactgagaagtcatgtgaaaattcgtcagtttgtttttactgtcaattttaacagtgtcacctatggcaaattgcaagctttgatggaagattctgaaactgttgtattgtttaaagctgatgacactgtactgattgcgcttactgattctgtagtattcctcatttcatcggcgcgaagtctgttagtgcttcccaacttcgaatgaggcacaaggtcgggtccatcagagcctctgcagcctcgtgcttgcaagatgaaacaacaaaatatttcgattttgtggtcattggcagcggtgttgctggcctaaggtatgctctggaagtgtctaagtacggctctgtcgccatcattaccaaagcagagcctcatgagagcaacacgaactacgcacaaggcggtgtcagcgcggttctatgcccctcagattctgtagagagccacatgcaagacaccattgtcgcgggggcttatctgtgtgatgaagagactgtcagggtaagttcagcatccatcatgaaggcaatggttgatttgtcatctagagcaatatgatcaatgcgtatttccgttgtcctttcctgttataaaaatcacaatactggattagtacattccattttatatttcaggtagtatgcacagaaggaccggagcgtgtgaaggagctcattgccatgggagcttcatttgaccatggcgaggacggaaggctgcaccttgcaagggaaggtggacattctcacaacagaatagttcattctgctgatatgactggaagagagatcgagagagcactgcttcaagcagttgataatgatgataacatatctttgtttggccaccactttgccattgatttactcacctgtcaggttggttaattgacatgttacctcttgcttcattcttgagtgtcctgcgttatagtccttttttttgtggacaatacttttgttgatcctgcataacaacaaaattcaatatataacttgcttgaagtaatgaccctagcttctattagtttggacctaaaaaaatagtctaatggaaactgaactagaagcgacagggaactcgtgataactggcactatcactgtcggcttcctaactcttgtcggtagctgcctcttaatcgtggcgtttaacgtttgactaactactgatagagtcaaatctggaattatctttaataagctgcacgtgttacatttatcttttctagattatccttgtctccactcctattttttaattacaatgtctcaatcacattatgatttcaacattttttacttaatctattcctgagagtacgataagagtatgaacaaattgaaacgtttatattccataaatgaaaatgcatgcgctacataccataaccaaatttgcacatcctattagtagactggaatgacttgactaacaggaggttttctgttgcagagtaatggtgaaatatattgctatggtgtggattcattggacgctgaaactcagaaggtacatcagctgtaattttgcttacatttcctcctgccagatttgtcatgcaatttttacattttctcttgtcatatttttcatcttgaaaccatttatgaaccagctttgtaaatatatgtcctatgtgatatccaggcaattcgtttcatctcgaaagtaacattgcttgcatctggaggagttggtcatatatacccctcaacgaccaatccaccggtatatgatacatcaccctcacaatctttaatatttttttcgtataatggattatttgaaggcattagctctaccttctgttctatatcatgctcattttttgctttgaaacgacaaatatcgtagatgaacaaccaaatacgatgcaccatgtagtttattatttgatggacaataagttgctgatgtaatgcttagtacgatatttcttagactctttgaatccaaacatttcaggtagctactggggatggaattgcaatgtctcatcgtgcgcaggctgtaatatctaatatggagtgagtatttctttcctgagtacacaccgttgacctttgttctcaaaacaaaattgaggatctcctcatccatcagctttcaattcatagcaatagctaccttagaaatcacttttccttctaacttcccttcgtaagttttgaaactttcatctcgtatctgggaaatataaatgacattgacacatcccaaacaatgacaggtttgtgcagttccacccaactgcactatcagatgagggtctcccaataaaaccagctacaagaagagagaatgcattcctcataacagaagcagtcagaggagatggaggaattctttataatcagtccatggagaggtttatgacttcgtatgatgaccgtgcagagttagcaccgagagatgtggtcgcaagaagcatagatgaccaactgaagaagaggggagaaaagtatgtcctcctggatatcagtcacaagccaagggaaaaggttcttgcccattttccaaacattgcagctgaatgcctgcgccacggtctcgacatcacacaacagccgatacctgttgttcctgcagctcattacatgtgtgggggtgtccgggctgggttgcagggggagacaaatgtgaaaggcctgtatgttgctggtgaggttgcatgcactggattgcacggtgctaatcggcttgcaagcaactcactgcttgaagcactggtgtttgctcggagagcagtgcagccttcaatagatcatatggtcgatgcagatgtcgatccttctttcgcgaagaaatgggctcgtcctgtgctgtctgtctcccttagggacagtatactatctgatatcattgagaagacaaagcaggccaggatggagcttcagtcaataatgtgggagtatgtcgggatagtgcggtcgacgaaccgcctgaagcacgcggaatggaagatcagtgatctggagtcagaatgggaggagttcttgttcaggagggggtggaagcctacaatggtgggggttgagacctgtgaaatgaggaacctcttctgctgcgcaaagctggttgtgaaaagtgctcttgcaaggcacgagagccgaggcttgcacttcaccgaagacttcccttacctggaggagagcaagaggaagcctacagtgatcttccctactcatatccaggagctgacatggagctcaaagccattgcagaagcagctgcagtgcaagtagatggcacacccatacaaattacaaagggagtttgggattgcagattccattaatttattaaaattaggctgaaccagcctgctatttgacaataaacacatgaattcaacctggaattgtgagaagttcattggctacaagcctacaattaggcttgaagtagcatgtatttaacaactgtttgttctaccgttctcatatgattcagctgttgtaagatgtaaacgaggttgtgttctgatctacagagattgtagtattttttttttctaaaagaattggcaggaatcaatttgtagtataggatcaaagatggttgtataaatcgattcgattgaagggatagactcccaactcaatcacctgataaatcttggttgttcactggatatttactgtttttatttccatcaatatttcgtatctggcatgtcgtcccagtggtgatcttaaaactcatatacggaatactgtctttgaagttatgtaagtttctacgcaattcagtttctctgattgtaactgtggggattatatttaccgcagaagcacaagagctgatatgcgtgtatgagttttcataattgtacgcatccttactgatttgatccaacatcctcataatctgtcatgtcttcatgctgagagcaattcacatgttacagagtaactagaagctgaaactttgttcatcacagaaacgtgcaacagcccaaaagcattaagttgttctttttataacctagaagttgttcatcacagaaacgtgcaacaagccaatatatattggatataacctagaagttgttccttttttttctctgaagactgaactccaatggttggcccatgattacatatacatgtgcaacacaagaatggctgcaccgaaaaacttagtctaagataggaaaaaggtaacatgctggttgctgctaagagcagctaaatatctcgccggaagagattgtaagcagagatgagggcactgatagcaaaaaccaagaatgccatgaatgaaatggcgatggagctgttcgccatcttcgggaaagggtcgcttccccagttgtcgatccaatcgcctactcgtgcagttgctgatgacgacgaagatatcagaaggtatgccagcacctggagaaatagtagcaaaaaataattcagcatcattctttacttccacagatcgaacaactaaaaatttacctttcagaaaaaaaaaactaataaaaagtcataacatgttgggaaagtgtaaatacctccagcaatagaaaaagaaacaaataaaaagctaactaatattccgtttgcaatttgttcgaaacaagcacacgggaaagatctgacaaactaaaataagaagaagtgtaaactgtggactgtggagcttgtcaaataaaatggtttaacggtgataagaagaatatattttatctcagccatgtattagtctgcaagagggaaaagagaagaactccatcatggaattcatgtgattttggagactgttaatctgagttgcccacccaaacggccaaaccatatgcatacagatgaatttctcttgtgaagaattagatacgatgtgacaatgtactcaaaagtaaaaaatcaggcatagatatatgacctcaaatatagagcaaatgaaggtaaattcagattgtctaggaggcggcacaaacctagaggctatatagtaaaatcaatatgaaggtgctacatacagatattctggccatataacactcaatataagacatgaaaacatgaagcaccaaactaatagaacctctagtcctcaacttcccctcattactaaagatctgtttggacttcagagcataatctttaatggcagaatatgccaaagccccacttatttttcatcatataggagaagatagtatgcatgcagcatgcaacgcctaatcagatgagtccacactgatttgaatgatacaagctcaattcaactactttcctcctgaattactctgcccaacctccaacaaatattagttcaaaatcatactgcttcatgcagattacatgtttggaactgggaaacataatttataattccagtgtaagttaaggcaacctgaatctatacattcggattcatatcaagacaatgagggcataacccatgccaacagtaattgcagaatcaaatgaagcacaaagtagcaaaacagtaatcacaagaaagaaatcttcacaagcttataaagcttatactttgcttcatgacgatgccttcacatctcttctgcatccttttgttcacatcacatcgcatgactcacagttgcacaatcctaaagaaacctatggaaaaaaaaaagagaggaagcaaatggctccgaatcagacacaaacctgatccatgaagaagtcgaagtaatctcctttgcgccgcggattcaaatgcttgttcctcctcatgagatctgcgagcacaaagaactggagcaccgagtacacgaacccaatcacgttcaccgcctcagagtacctaaaccgcacaatcgcattaagcaaatcactaattcaagaaccctaagaagaaaaaattgtaaaatatttcttggaaaattttcgcgtaccgcaactggctgtagttgctgtaggagtcaagggcgaaacccttgcggctgtcggcggcgagcaccgcgagcgccgcgaggcagagcagcgcggccgcaacccgcgccaccagcgcggtgcgctgcagaacagccgtgcgccgcttgcgcaacaggatgtcgggcaccacccggtggtcgtgctcgaccgccctagccggcactctcggtgccggagccggagccggcctcggtgcgggagcaggcggaggcaccagcacaggcgccgctggcgctggaggaggaggaggcggggatggatcccatgcccgcggcggctgcgggggtggctggaattgcggcttcttcctcggcggcggcggggggcgatacggtttggcggtgcggccgccgttccacgagtaccatgagcggccatccccgccgccgacgtggcccgcggcgctcgggggcacgtacttggcggccgccgcgtgcgtctgggaggagacgacgatggccgcggagtgcgggggagaggcggaggaggactgcggcggggtggggggcctcttctcctcggccgcccactcgtcgcccgccgcgctgtgcatcggcgtcaccggcggatcccccgccgcgcccgcgccgcccgccgccgcctccggcgagcggcggggcgacggcgacggggagggctgcgcctcgagtgccattgatttggggggagaagtgagtggtgcggtgtttgctttgcttttgcttggcctactagtagtagtagttgcaagggagcttttcaaaaacttgggcattaagattcgcccaaattcctctgaattcctgggaatttagcagtttttcatgaatttcatgtattctggatttctgttcgtattcatgtagatcgtgtgtacggaggaattttgtgtgttctttttgcagattgtttatatatagtaatgttgggagtatctttttaaaaccaaatgtaagtgtcaaagaatacacgagaatatggggtcatcttttcacaaaacctgctgactatccttgtccgaggaatcaaaatatttgtaatcaccacgacgttaatctaatcgattggacactacacttgagcataagtatagttattctgtactccatttatcagtcgcaactatttctttattttagaacttaatatttatagtgagtttctttatatatttctattacagtttaatttttagcattgattttcaagtcactaaaaatatatttataaaagttttatccataatttattttttattgttaataagtttttcagcttacattcagttatagatgaaacgatgagattgcttttctttttaataaagaataaaacgcacttcaacatttgcatggagttggttgcttggaaacatcaatgttctccccctttgcaactttttgacagtagtgctcaacacggtggacgggcaggacgaacgaggcttttcgatggtttcattctaatcttcttcggtttcatgtcagcaatcagtgtccttctctgcatatatatgttatcatgtgccatacactcacgcttgcattccatcattaaagatgttagttgatattactactaattaatcatctctacataggcaagattaacagatatcgcctccatttgagatttgaccaatctgtcgagctacagtactacacgtctcatctctctctgttttgctccctttcagtttcaattactgtaaagactctccgagggctcctttgaaacaaataaaaattgaacgaatttttgagggttaaattcatagaggaaaaaaaatcctatttgactctttaaaacaaataaatagtttaaaaaattcattcaaaattcctatggaataaaccattttccatgggatttctggaagaacaggtttcgctcgcttgtgttggaaaaaataccctatctcatcatttaccttaactaacactttaccccctccaacacatctcatgatccaatcactaaacactagggaagccttttgcttccagcatctgccatagaaatggccattttattttatcataggacttctcaaagtccaccttaaacagaactcctgattgcttttcatatgaacactagttaaaacttcatgcaatatcactactccctccatgatgttttttttatttaagaaaagtagtttgtgttttctcaattaagtcacctatgacataggttagcctctttatcagtgttcttgttatgattttgaaactaacattaaggagacatattggcctaaacttctaaatttgtgctgcatctttgcatttaggaattaaggatataaccccataattcagtcttttgatatccaaaatcatctgatgaaaatcatcaatcatagctttcagatcattttttatcaccactcaaaagtgtttataaaaataagcagggaaaccaacaggcctaggtgccttttacattccatttcaaacacaaccttcttcacctagtaaagggtttcaacaattccttcttttgatcttcagacaattgtcccatctttttcacctcttccaaagtaaagggtttcaacaattccttcttttgatcatcagacaattgtcccatctccaaattttgtaatcttatattagatctttcaggtggcccaaatagatctttataaaaatatgctattgacggagcgtggggctcctcaccgggagaccgtgcaggcctccctttgccggttcggccggggagcctgggtgaagttctaagctcttggtatgtggaaggttcgcgagagtggaaacacacaagacacgggcgatgtatacaggttcgggccgctgagaagcgtaataccctactcctgtgttttggtggatcgtgtatgaagaagctacaaagtgcgagccagcccccgatcgttctgggatcgtttttttgtttctccctctcccccctctctaagtgggcaaggtcctccttttatatctcaaggggataccacatgcaccatctctccctttccaaactggacttgccttctcttcattaatggacggagatttgtatggttgccgtccgaatgaccttctgatgggacggcccatacctacctccacttccgccggaagcaggcgcgacgtgggaaaatggctgtctgctgacgacatgaccagtgtcagaccggtcacaaatcggtcatttttgtccaccacgcgtcagtttaacaatctgcatgttcgcccttcttcatacaatatcttgcttgtaatggttaggatgaagcctggcatatatctggccggggccaacgtgccatctccaggagataacacgccggctccggctagggacgagtgcttggaggctctcatcctgacgggatggggcgaggcgtgtgtcagaccgcctattgccacctaacccacgatctgaccggtctgtgaccggtcacagaccggataaacgagcgcgctgcacggcgttacatgcggcgtgacgcgcttcgtccaaaccgcaataaatgcggtcaggtgagccccgctgcgctcacctaacctatacacgcggcgcacaaccttcaaggggtcggggcgcctcagccctcggggccgaaacgggagcggtccgacccctcggggagacaaggagggggggcggccacatcaccctcgggcccgacccccccccccccccgccccgagggggtcaggcctcgtgggtgattgctcctgcccaagcctctagttatgatactcccggtcccatgtcaccgacagctataaaactcagcaactgctcttgcccagctatcaacacattctcctgtttcaaacaaaaaaacatatctttcctccttctcccattagctttggcatgatattatttagtgttattatcacctctaacacatctctctccttgcatctttgtaaccattttagcatctccttcctcgtagtaaacctcggttgatcctatctccctctctcttctatgctcacatacaccatgattcttacaccatttatttaactcttctaactccctcactaatttctcctttttctctcttatactttcctttccaattcatattccaacccttaagagctttccttaaatttctaagattttttttaccatttttctatacttaagagaccctccttactatttcataggcttttctcaccacatcatgtatatttctctcaacatcaaactatttttaaacttaaaaggcttttctcaccgcattatgtacatcttccctcaacatccaactattttcaaacttctttttttggtaattgatatgtatccaatggaatatgtacatgatcagaataaatcctctttagacttcttactattattgtaattagataattactctcccagctgttagcgactaagcttctcacactgtattcattagttattataccatgtgataacacacatactcaacttattttgatcaacaattgcattgaacagaaaactctatttattataacctcccttcttatttttctcactttattttctaattatattaaattcacaccccaacactattggataggactgttttttggcaaattaaaacaagttttaaaaactcatcattttttagtagaaccataaaccactatcaaattccaagtaaaaccatcagatttattcattaacagaacccttactaaaaatttctcacaatcttcttctctaacttcaaaagtaaaaccatcagatttattcattaacagaacccttactaaatatttctcacactcttcatctataacttcaaaaactatttcacatccttcatctttaagattcaagaactatctcattgtagtactcaaactatttattttaaaaggtgatattagattcttgtcttatttcattgcttcataaccaccaattatacgatgaacttataatgtagagaatgagaagggtggaaaagtggtcagcaatacaacatgtgtgtagttaaaatattttaacaagaaatcatcacaaataaacgcctctaattgaaaagataagataaatctccgtgactttgcctatctccgtgtgcggtgaatcaattatgttagaaactgttttctgtgaatccttctaatatcccaacctaagctaatttggatgtagatgttccttctccatactcaccaagtccagatatagaagacccaacctaaaatccattgtgtaactacttggcatggtttaatctctcggtccgaaattatataattttatgaataaaatttgatcaattttgaacaaaatattaccaaattcacgaaaaaatgaaataaaaataaaaatttcggccgaaataatatcgtattgggttctaataatgtgaaccctggtcaccactggtggatacttgcacatattaaatgcattttcaactggcaccatagtctcatcgtgtattgtgacttcagtaccaacaaatacaatcccagcacactttaacatatgactcaacattggtatcattctatgactaacccccataacaattgttactaagtgttttgccaaagaatcgatactgaggcaaattgacattttctaactgcaaaccaaacatcggaaatcgggatgtgtgagtcttctttatagttccagaaatgcggatagtaaactgtacaagagttttccttatcgtctatcataaacaaacctattgaaattcaaaattgtactgagatgaaatcacggggatatcaaaattatattaccttgtaacaatacaatgatctaactatacaaacagtagatacacttcatagaattttacttactacataaagacggagttagaaaattataaagagtagtgttgaacttgactatgcacatgactatatctttatatgaatttaggagaccggagaccagcctagggctcaaggtctagttgtcctcttgtctccagttagactgaccaattaatgtgcaaactctagactattacagataagaataaatgatcacatgaaaaccagtacggagcttatgatccttgaagatgacaaatcctagtaaaagtattttatgacatacttatgtaacgatacaccaaacaagatttttatgcaatttcgtaatgccttacgagcaactaatcaaacaaggtgagctaagtagttaatcatccaatagaatgattagaaaacgtgcattggtgcataaaatgtatagtttgtaagatgatacgaatgcacccgtacccatttcactatctccattttatgttcagattatgaatttgaagtgacatgtagagaatcaactggaagaatcaaccgtagttgagaatggtcatgattcaaaaagacagaaaaactggggtgtttagcgaaggaaattaggtgaagtactatgttttggtttttatactcgtacagttagactattacatagtggaatgttagctgattaaacaaaatggatgttatttggccagtaaaatattgataactgccaacctatttataagtgaatgtatcaaatgcacagttgtttttgaacaactgctagtagcatctgtagggtttattccaagtttaaatcaaccataaagagcagctcgagcatatgcttaatgtgtataagttaacaagagtatgttgtgagattatactgttttctctcatgaatgcgcaatttagttccttttttgggtgaaaaatatatatagttactccatccatcccataatatagcaacctggtaccggatgtgacatctcataatacaatgcagattcattgtattatgagatgttccatccagtactaggttgttatactatgggactatgggacggagggagtttttttttttctctattgctcacaggcagcatgctagtgtcaggtttgacatgtagagtagcattactattgtccagtagtgttgaattgttctaattttcgaataatatttctttctagcttggtaggtgtacacctaagtttcttctactgacgctctatagtttctttctagctctagtagtactgttgaattgttctaacttttccattttcttaaataagaatttaatcattttagtagtacagagaacaagtgagattttgggaggatcgctgggtgggtgacaactcctttgataagttgtatccctcactctatttactaacaagaaataagcatgcgagagtgagcgaagtactgggcaatgttcctctaaatgtgtcctttagaagggcgttggtgggggtaacctgaatgcatggtacaaactggtagccaaggtggccttgtttaacttatctaatagtccagattttttttaagatgggaatccaatgggaggggagtcttctcgatgggttctatgtataaggctcttatgtaacataatgtggtaccaagatctttaatctgaaagctcagaattccacttaggattaagattttcctttggtatatcaaagaaagagtactcttaacaaaagacaatttggttaaaaggagatggaaaggaagtactaaagaatcttgattgtcatgttgcacagttggtttggaatgctcttttcatggtcctaggaatacaagtgcctacttctgctgctaatcttctaggaatacaagtgcctacttctgctgctaatcttctaggtggttggtcaaggggcttagtacctaaccttagagatcaactcttcgtgggagttgcagctatctcttgggcactttgacttgctaggaatgatgtagtcttcaatggctaaaatattaactctctcttgcaggttatttttagggcgacacactgggctcgctagtggtctttgcttcttaaagaaggtgatgaggaagccgtgaagattgggtgccaaaaattgaaagttatcgttatagaattctactcaaaatctgggtggaattggagaggaagattgaattgttagttgaaatcttttgttgtgagacttgttctgatgtctttgtcgtccgcctgcctcctatggtggcgtttgcctttgaacttgtttgtaagcctaagtgattgacgatgtaatactggggtgatgctaataggcgcgtacgcgctgcgaagcaaagtcgcagacgcgcagatgctgccagtcccgcacgagcaccttccgagccttccactaatatctgtgttagtgctaatctttagcggtttacactaattgatttttgtaatgaaatgataaataaaatagttgggttgaaaattttaaaatacgaattgaaagtttagttgaaagttttcaaatttgagtgtaaagttttcgaatttgagttgaaagttttcaaattttgacttgaaagtttttgatcttgagttgaaaattttcaaatcttgacttaaaagttttaaattttcaattgaaagttttcacatttgagttgaaaattttcaaatcttgactgaaagtttttaaatttaagttgaaagttttcaaatcttgacttaaaagttttcaaatttaaattgaaagttttaaattttcagtataaagttcattcgaatttcaattttttttcatacactgtgtatataaaatgatatgaagctaatcacgtgagatagaaaagagagacaaaaacaagtcagacgtgcttgcttccgcttctgtgggccggcgtgggcttagccccatgcaccgataagcatctcgcgcatacgcggatgagaatgtgggcctcgcgcgagttgtgttgatggcgcgtgcgcgcccattagcaatttcggtaaaatactgtggttgtgtacattcttcaggatgtagaggctgggttttatttaatccattatcaaaaaaatgagaataatcatggaatattgtttgttttttatcacagacgaatggagtactagccatgtcgacctatgaagctaaagcttagccaccagaatcaccagcagtgatcttgaactggttgtgaattttgtgatctcgaagttactctgcttgcccctgggtgaacagatcaatgaactaccgatcgtgttggagaattagtttgttttgtttctactcctgatttcatcgtgccgcgtgacgcttacaagtcgctagaactgctatttacctctacttacaatttctgaatgttgtcagtgtacgtgtacatacgactttagattgaccttggattttcataaattcccaacacccatgtacttgtagcaaacttagctagtagaaatgaaattttgatttaaggataaggatccatattatccattaattgggtgttacagcataaataactaaactcgacattttacttatttcttcaacatgtagcaatttcaggcgttgtagcagatgctgacgggcggtcgtcacttcctagttcttctccttgtaactgttgcagctatcgacacaagctgcaacatcagcatctgttgcccgtgctgctagccataataacccaaaaaaaaaaagttaagatgcaaacacatgcgagatcgcatgaacacacgttcataactatgagtttgcaacattatcatatattaatatatatggaggagcctgtcaattagtaatttagtattacttttatttttttaatagataacaccattagcttttttcatatgtttgattatttgtcttattaaaaaatttatgtaattataattaattttgttgtgaattgttttatcacacaaaaatattttaagtatgatttatattctactatatatttacataaatttttcctataaaacaaatgattataaatttttcctataaaacgaatgattaaacacatacttaaaaatcaaccgtgtcacttattaaaaccccgaggtaggactaagtctgcagactaatgaaggaccgcataatcttacattctccggttgccgcatccccgatcgacgacgtgcagagctccctgcagcctgcatctccggcgaacaccggcgccgccgccgccgccgtcgactcgccgcctcgggtacagttgtgaatcggcttcaagacgcagcaggtgaagcagaagagcttgcagccagctcgagaactgccttgctcgcagtcaggcaagcagtcatcgtagcatctgccgatctcggactccgctgacgccagctgcagctggcctgacgtcagcaggatgagcagcaagatgcaggcagcagcagtagctgccaccactccattcctccccattgattctttggtcttgttcagtcctgatgcaaagccagaggcagagattggattaagtgtaaaaaaactgaacaaattgctagctcacatgaactgagaagaagaccttggtgaagcttgctgaataattgttgttctactgctgagatagaacctgagacattttatactagcattgagggcttgaagaagtaaatgttctttggagaagttttctccaaatattactgtgataactgatctatcatcctgattagcctagttccacaagaagcattgcttctttgttgcaactgcatgcgcccccaaattccgttctggaaattctgtttctcacctgaccatacttggaacaatgtccagtacttcacatgcttgccagattccaaacatgaactgaattacaaattcagagaaactgcctgacaaatataactcgaaaccattggttcattggttgcagggaactacacgcatcaaccattccccgtttcgagtttgcatactgttgataattaacagaaaccttattttaccatccatagaaataggaagtagctgcaatccacattgaaatacgagtgttgcattttattctaggaaaatttaagcctgggaagcaataattcaacatgcatactactccctccgtcccacaatgtaagtgattttcagtttttacttgtaacgtttgaccactcgtcttattcaaatttttttataaatataaaaaacaaatagttgtgcttaaaatactgtagataataaagtaagtcacaaataaaattattaatagtttcaaaaaattttgaataagacgagtggtcatacgttgcaagcaaaaactcaaaatcccttatattatgggacggagggagtacaaaatatgagtagcatttacttatatcttgagtacaaacaatcgggtaggtacgtatatttagccgtataaaatgggtgaaggaaaaaaaaaagtttgactagtcaaccatcctatccgaccccatgctcgtctgccacgtggcccagtaactaaatgggccgtacaagtttcacttatccaccgcgacatcgaattttttttatttataattttttttattaaaagttttacaaaaataattttccattttgaaaattgacggaaatagtcgcctaccgccctctgggagggcgatttttaaaaatcgccctcccagagggcggcgaaaatgacgtggcagacggccgttcgctctcgggcgacggccgtcaacgaaatttgcaggcggcccccttgccgcccttcgcgagggcgattttctactgtgcggggggccgcctgcaaatgggcggcgagggggggcatggaattttgcaggcggcccccttgccgccctccgcgagggcgattttgtactgtgcggggggccgcctgcaaatgggcggcgagggggcatggaattttgcaggcggcccccttgccgccctgggggagggcgatttttgcctcccccctataaagcccagcccctcccctgtgaaatttcattatattcactaaaaatccaaaaaaacgaaagagagagagaggggagggcagcagaaggggagcggcgaagccctgctggttcgctcacttcatcacaggtatgctcccatacatcttttgcatttgtactaatatattacgtttgagtacatatgttgcgttttagttttagttccatatattttagcagatctgtagcacacagcacatatgtgtagatccagagcatagaatataatagtatgaattgagacatagacagtagtgttaattgtaagatgtagtttagtttgatctggagaatgtaacctacttttagaaatttagagaacaatattgtagagaatgtaacttagggcgtagtacagaaatgcgaggttaacgcagttattgttttcatcaggcacaatgtcaagtaaggtcacatttcagatagttcacggtgaaggaaatattagatttggtccagatggtgttgatctgttagattttgtaatgacatctaagggcatcgataggcctgcggagagaacatttgagtcaatttatagttggttgttgagaggatttagaatagaccaagaagtctacacaatgtcagtatctgttgtagtgagtcgtgcaatagaaggttatttttgggaactaatgccgatggacagcactgctgcttggagacggtatgtggaaatggcttttgaacggtcatggcccctcgttatatttgtgtcggtacaagagaaagatacaaatgtttcaatgcaaaccgaagatgtggagggtcctagcaatgcaggggatgttgttggaccatcgatgcaaaatgaggaaaatcaaccaagggaggagcaggccatgggcatggcggatgagggggagagagtcggtataattgttgatgaaatggagagggaagattcggataatgagcaagcggaggacgacgcatcatccgatgaggaaggtgatgtaatggccactgattgggcaaatgaggacttctctggtcttgttatatcagagggtgatcatgtaccctgggagtataaggagaacgaggtaattgagggtgcaaggtatgctcataaggatgagatgaaggaggcggtgaagcattgggcagtttcattgcagagagagtttagggtggtcaagtcaacaaattatgtgtatgaagtgaggtgcatgaaggaagaatgtccgtggcgtgtccatgcatataagggtaaatggaatgattattggaaagttagcattgtgaccgagcacaagtgctacttacaaggggtggagaagtatcaccgaaacatcacttcagcttttgtggcaagtgagatgtacagcagtgttgttggtaacattggctttgaaccaaaatcaattattaggcacatcgagaacaaattcaagtacaccataagctatgcaaaggcctggagagccaaacaaaagatcattgagatgaggtatggcacatttgaagcttcttatgataatttgcctcgtttgttagccaccattgcccagaggaataataatacttactatgacctacatacatttacatcggttgaagatcgaacaaagagtgtgctgcaaagagcctttttctcattgggtgcttgcatcaatgcttttgtgcattgtcgacctgttctatgcatagatggaacttttatgacaggtaaataccgaggtcagatattgacagcaattgggtgtgatgggaacaaccaggttctacctatggctttcgcatttgtagagagtgagaacactgaaagctggtactggttcctagagagagtgcacattgcagtggtgcgtatgaggcccaacgtttgccttatacatgatcgtcatgcgggtatgttgcgggctattgactacttgcagaacggttgggatgagaagggacttccagctaagtggcctgatgttcggagtcggtggtgcatgcgtcacatgggtgcaaatttctataagcaattcaagaacaagcatcttatggatctctttaagaggctctgtgcacagaaccaagagaagaaatttaatgagttgtgggacaagttggatgagttgacaacgaagcaaacagatgagcaatctcgcagaccacaagttgaaggtgacgagcctcccatacctcttggtgcattacatgatgacccaccaacaatgagaaggaggtcagggtcggccatcagaaatttctctcagtggattgagaatgagcctaaggagaagtgggctctattgttcgacaccgatggatctcggtatggcataatgacaaccaatttggcagaggtgtacaactgggtaatgcgaggagttcgggtacttccattggttgctattgttgaattcatccttcacggcacgcaagcctactttagggatcgatacaagaaaattggtccgtccatggccgataacaacatagtgtttggcaacgtagtgacaaagtacatggaagataaaatcaaaaaggcacggagacatagagttgttgctcaaggcacacaagtgcatcggtatgaaataatgtgtgttgataggagcaggcgtggtatctatcgcaagcaagccgtgcaggaatgtgtcttgaaggcggatggtggatgtacctgcagttgtatgaagccgaagcttcatcaccttccttgctcacacgttcttgctgctgccggtgattgtggcatatctcccaatgtgtacgtctcaaattatttcaggaaagaagcaatctttcatacatggagtgaggagatatatgggttcgggatctcaggatcttacacaacgctgagtgcccaagttttttatattccagatccatctaagttaagggtgaaaaagggtcgacgccaaactagacgcatcagaaatgatatggatgagtcagaagcaggtgggaggactttacgctgcagcaagtgtgatctgcgcggccatacttacaagaaatgcccgaagaatgcagaagttccaagcggcgctgatgctagtccatctggacaggcaagtgatggtaggcgaccacctggtgaaggaacaacaagcaggcgcgcaaggccaaggcgtcgtcgcgcagcaggcgattccatggtgtaacaatgctttcgatttaggaaataaaatgatgtaatgagtgttcggactaaatacttctatcgtgtaatttcaattcaatcttgttgtaatgagtacctccgactattgttgtactagtagtattgcgaactattcggtgttgtatcataatgttatcgtgatgagtgttcggactaaacacttttgtttgtttgtactcttgtttaatatgtgttagtaattcgcttatgaacatttattacttatgttgaactaattatttatatgtttctgatcaacctatttgatgcaggtatggcgtacgacacaccggcgctgttgaaccgtgggattgacaggaaccaccgctcgttcctgtcagcagtcgagggtgcacagctcggcaccttccgtccacgcacgtcgcgcgagtggttgcgtgtcgacccccgtcacgttccttggtacgcgtatgttcacatttgaactcaactttgctttgttttgcacttatgtttgaagtttgctctatacaggttgcgtgtggcaggccttctaccactttgtaggcttgttgaggcggcggcggacgaccgtgacccagcgaagcggtgggatgcagaccggtcactccttgccgctcttgtagaccgctggagacctgagacgcacacgttccaccttccctgtggggagatggctccgacactgcaggacgtgtcgtacctgctcgggctaccgctggcgggagcaccagttggtcccgtcgacggtgtttttgggtggaaggaggatatcactgcgcgcttcgagcaggtgatgcgccttccacacctaggaccgaccaccacccttcctccgtactctacagtcgggcctagcaaggcttggttgctccagttcactgtaagtaaataagttgttattatcatacatgcttatttgcgaccggatgagtgttttgtactaacatttcattcttaactgtaggcggaccttctgcaccctgacgctgatgattactcggtccgacgctcccttgaggcgtacctgttgtggttgttcgggtgggtgatgttcactagcacccacgggcacgctgtggacttccggctggtccactacgcacggtccatcgcggatgctcagccacaggacgtgccgcagtggagctggggttctgccgtgctagcagccacgtaccgtgccctctgtgaggcgtgcacgaagactgacgcgggagcgatcatcgctggctgtcctatgttgcttcagctttgggcagccgagaggtttgccatagggcgaccagtggtggacagcgcaccctacggggttggtcgcagcgcgcagtggccagaggacggtcccacgatggggacttactggtgtcgacgtggggttagtgcaacttcgctgcgttataagtttatcagtcctcttctttttttttccttcacataacatgtctaattccgatcatgtttattgcagcgtcgttacgctcacgtccaggtgagacgtggttacccggacttcgtgttcgagtttgaccgtctccagccgagcgacgtcatctgggagccgtacacagaagaggccgtcgctgcgagagcaccgctaggactttcgtccttgtgcacacgcgaccaggcttactggctcaccatcctgccgatggtgttcgacattttcgttgagcctcactgcccgcagcgtgtgatgagacagttcggacttaggcaggtgtttccgggcaacgtgcagccgaccgtcccccctgccgaccactcgtgagttcggattgttcatttctaaatttttatgataattacatcatcgagccatacaatttacctctcttcacaggttgactcgacggggacagctagcaggcgcactttgggctccacgtgtacagcagtacgttgacgactgggtgttagctacagaggaggtgatcaacgagctcttcccacacacggaggagaactaccgtgactaccttcgctggtaccttcctcgcactcgtgcgcgtgtgaccttcactccagacgccccagagccgcacgttgccgctgtcacggacgcgtatcccacgcaccgtgaccgagactactttgtggcggtacgtccaatttgtattacttccaacaattatgtcatttatcttgcataatataggacaactactgaattttttatttccatcttgcataggctgatgcggcacgggatatcagtgccgatatcaccgcagtccaggtgaggttgagcagaggtttgcacttgactgacgttgagcagaggtcgaccttcgaccggatgcaggagaagatgcgtgcggtcatgcgcgtcttctcctgtcgcagcgccgtggacgtcgtacctccagctggtccggtacacccacggcctcgcggtcctaccgtcggagcaggacctcgtttgtcttcgagcgcccctagcttcggagcagtgcgacctacagcaccagtttcgcatggtacagttcagcccagatattagttcatttttgtttcagcttttgcacgaatgtgtcaccatgttttaactacacgtttcctcatcgcaggacctcgtatgccttcgagcgcgttcgcaggcacgaccggcgcttccgcgagctccgcaggggcgttcgccacctcttcgggcgcgttcgccagctcttcctctcacggagcgtcgatccctcgcccacacggtactttactttttattaatactgttaaatacctgtacgaaactgatggtccttgtccagcaggatttgcagccgggatcttcggtactggggcctcttcgtctcacgccggtaggactggtcctactagccagttctacgacgacgacttgcacggtgcagaccaccaggacgtactaggctcctctcagcttggaggagctccagaggcgcacactcaggagcagccagaggtcacacctgtacaggcaggacgggttggccgtgccgtacccccggaccgactcacgtactcccaggggcacattagggcgcagggtaggagggacaggggtaagaggcctcgtcagtagtgttctacctcttcagtccttatgtgaccgtttcttttggcttacaaacttgtaaagcggtactacttttgctattactactgcagtactacttgtgtttgtctcgtctacgtagttcttttcattcgtatggtgcttgaacaacttatgctcacaacaacacactttcggcgcttcacggtagtgccatatccagtagcgcgcacagtccacaacagcacacatgaaaagcggcagctcgagttatcactatcaactttcggcgctgcctgttgacataaagtgaatcacgcccacgcgtgatcgtcttgtcacatctaatgaataatgtatctcattgagttcacatatattgcagtgaaaacgacgctatataattgacaatctgaaggcaacctcttcatatcttctttcccactaccacaccacacacgaaaatggaagcctattaattggtaatacgtaatctagaattgagattatgtacaacattcttcactacaattttacattttggcagcaaaccaaatatgatcaaatgcaattttaccttaccaaatatttggtagtgccaaaacttgcttatattttggcattaacaaaatatttgtacggtaacattccaaatatgccctaaaaaataataaaattgtattttaccagtcttggagattttaatcttgtatagttttcaatataaaaagatttgataactattgatatttatataaaaaaaatatagagcacagtacaaaatcgccctcccccagagggcggcaagggggccgcctgcaaatttcgttgacggccgtcgcccgagagcgaacggccgtctgccacgtcattttcgccgccctctgggagggcgatttttaaaaatcgccctcccagagggcggtaggcgactatttccgttaattttcaaaatggaaaattatttttgtaaaacttttaataaaaaaaattataaataaaaaaaattccgcgacatcggccaatacggcccacataaaagcccaagcttcgtgcatgcggcggcccacagcagaaagtacgtctgacacctccggcgatcgaccaccgggttccgctcgccggcaaagtcgccgttccacgttcccgccgccggcgccgccaccgccggccgtaagttgaatctgcctccgaaattcatcggctcgatctgttttaactgttttagagattatctccattattattgttatttttttccgtttttgtttctgagcatttcttcctcagttcagagctaaccgtgtcacagttactagacaagctgaacgaactcaattttgaatttctagttactcgaggataatctgattaccgagtgataatccacggtatatacatcattatctctccttccgaatcgcatgttagagtagaggatagtgctaattaactagaggatgagataagccgttggacacattcctgcatgcaatgcaaacgcaaagcaagtgtgatccatccatgcgtgaggatcggagtacgtgtttatctgatggaatccgcagattcctccggaatcagcagcgatttctccctccctcccgatgaatcgccgccatactctcctcccctctatataaaccccacccgcgggactacgtcatcatcctgccactctacaaagagcttaattagctagctagtctcttcgatctgcttctctctttggtttccatggcttcttctcgggttgtcgtcgcggtggcgctgctcgtggcggcggtgctcgccgcgttcggtgcgctggcgccggcgtgcgagggcgcgagggtgatgcgcgagggcgccgccgtcgtcggcaagatgtcgagctaccagccgccggtgaggcataagcctcccgtcccgccgtcggggccgtcgcacaggcacaacaagagggcgacagtcccgaggaagaggaagcacttcccgccgtcgggcccgtcgtaccacgatccgcacagctgagctccggcgatcgtcgtgcgcggccatggaaagacggccggccagtcagcatctctctctgcagtagcttcattaattaattgatttaattagttaggaattataataataatagcaggagagattatctagcttaattgttatttccttcttttgattagtttggtaggttaatttgaggtgtaatgcaggtattgttaattagcatttcgtatagaaatgcgcatgatacatgcatgccatttagtttaatttttagatgtttctctacgaattattcattttcttaaataaagttactttgcttattaattagttattaattgggttaaatctctactatcttaaaaatggagtcgttcttcttccattctctcatcctacatagcacatactaattacacatggaggtgagaaaaacattataggtgctgattttaactgtttcggcacctatagtgttgatctctatatatattttagtagtagtagtgacgttacacggaatactggtaatattataaaaatctcatttacgatttaattatttgccctcgtaatattgaaacactaattcatacgctaattcatgtatctttggagacgatttctgccgaccgttgctactcttaattaaaatgggttttctaattgcatctgaacaaaattcactcagcctcaagattaatttctttagtgaaatgttcacttaaataagggtttattttattttcatcactagcaaaaataatagatgaaacaaattatataacaatccgtgacaaatcttttaaaatgttagaggattaatttttatggaaactgaactaattcttatgaaaatcatataacccaaatatttctttcccaactagcaaaatacccaagctctgctacagataaaatatattatattataatatgtaatagacaaaataaaaatatcaaatatattattatcacttatatgcatgtttgaatatatggtattcacgtgttttaactaaatatttaaactattccataatattagaaaatatcaatggtaaatttgtaaaaagttataaacagtgctggcgtgacagacttttaaatgagcatagatgtgacacgatccaaacatttttttaaaaaaaataaaataaatacacccacaccgccacacgaggtcttgtgcacgtactagcctgcaagctgctatataaatataccacaaggaagcaaagagaactgaggcgcgtctcgcactcttgctcccttctccctcctcgactgatcactgatcgatcgatcgatcgccatggctcctccttgccgccgtccgtacgccgtcgttgtgccagcggtgcgggtcgccgtgcttgtcgtcgtcgtcgtcgtcgtcttgctcgtgctgctctgcggaccatgcgacggcggcgcgaggcacatgctgcaggaggagagtggtggcgcgtgggcgcggcggtcgccggagcccggcgccgccggcgtcctgcaccgccggacgtccgacttcctcccgccgtccggcccgtcggagcggcacaacgctcgcctcgacgccgacgtcgccgagcgcggccagagctcgccgccggcgtcgccctgacgatcgaccatgtgtgcaagctgctcatgaatattaatctactctctcctcttctcttctgattcagtgaaagtttggaaatatatgtgtgaattatttcagatgttttctatcccgagtgtgataattcagctggattctactctgtcatctgtccattgaaagatgtatatatatttgcagagattcagagaccaagaatgtctggctttctgaaacttcaaagatgtttattcttggcagagataagactgtatttggttgatattttgttcatctagcatgcttgcatagttgcatgaaactatggaacatttgttagtttaattctgtcctattaagttgttggcattattgtagacttgctgcacatggtggagtggttgttcagttatgtgatacatattcaagtaagctagatatcagcaggtgactaggtcttccctgtgcatcatctagtcatgctgctctaatgattctatcctgaactagatagatagatttgatatgcttaaatgatgctcaatgatgatgtaactgttgcataatgcatatatacttgcagttgtattagttaaaaaaatgctaaaatgttgtggattaggctctgcatgtagatcgtgttggtgtgtcactggccagagcttgcaacagatttacctgctcccactcaccacttttgcacttcacaccagtatgctgcatgtaacctgtatgcatgcagctagccagttccccccaactgaatgctagaaatgatatgaaattgcacatgcaattctgggataatatggcatgcattgacataatttaccaattaccattgagatctgttgattttgttctgaaacggtaatatggtactaaggtaaaaaagtgccagattgttcatatggcagatagagtcatcacacactgccaggctatgaggaaaatgcatgtacaacaagccgagttgccaaatttggcctcgaattgacaaagacaactcatttctccaagcttgatgcttttggaagatgatcaataggtgatataagctaagagcctagagtatcagctcatagatataggcaaggatccatgatactgatggtataaacagttattggaatttggaattgcatcaagatcatggccggctgaacgctggttactgatgccctaggagagcatcctggtcacattatctgacaactcatagacaacctcttccatgtcctcagagataccattctccttcagagtgaaaaaaaaaaaggcaaagtgaaacagagtaaaacttagtcagacccacaaaaacaaagatacgagggaaaaaatgcactgataatttactcataagatttaccaagtgtcaggctaaaatttaagcactgtcatcatactggcagtaggcaaataccttcgggcctttattccctctaatgatgcacgttgaagcactgatactagcactctttaaatagatcttaggattggagtttagattgattatgccatttggataagcagatgcacgattcttgcccttttcttgtgatcttgggggacttatcatagttcgggcaatagaagatatcgctctcctctcttcattgtcagagtcttgattattgctatctactgatgagcatactctttccctgtcacatgattttttttgtaaagaagcaagcagaacaagaaccacataagattctctgttcagataaaaaaaaggattttaggcaattttaagtttcaggagctagtgaattccagctatataccttggcaaagacgcatgctgtctccgcaagggggtacttctttctcctctgctgtagttctcctcaagatgagcaaactgccgtttgaaacgatcaaccccactgtaaggagttagtattagcaaaagagacatggataagggtgttggttatatcacctgccagcactatcagcatgaaaatatatacaaattatgttttttcactatcgtaaaacaatcatattccccggagagtagaaaataaagcaaaccagctaggtatgaagaaataaagcaccaccgaatgaacaatactttttttaaagcacgccagcaaactagatttaaaaactaatttgctcaccttggatagaggaagctaatttgttctccacctctgatgtactcctgaagcatttggggatggtactctaatatctgtttactttcagaaaataaaaaagtaattttgagtgagatggatttatcagccagcccataacataaaatggagcggtagctttgtacctctcgatatatcatttctcttacatcatcctttgtcagtttccttcgctcaaattcaaactcaaattttgaaactggcagtcttgaaggctcccggctcaacttagaaattcctctaaaatatggatcagctaaagcctaaagtaagtaggaaaggttatgcttactcatcagaaatcacttgtgaaattaattggacataaaataagagggaaaattggaaccatgccattataattttgtaaaatttgagatatgccatcctgacccacacgtcattgactcatgtgggtcttacatgttattgagataccgatggcatatctcaaactttacaaaattataatggcatggttccaatttacccaaaccttttccaccaaaagaaaatacctcttcagcagtaggtcgatctttaggatcaaatgcaagtaaacgctctagcaggcgcaaagcgagaggatcagcattatgaaacttatgagaaaaggggataggatgtttcctctgcatgccagttaaatatcccctggcattctcattacgaatctgcaggtgttatattaaatattaaagaaatcattgcatgaatactcatgtgtctctgcaagacatgtgattagaatagcagaaatcacaattacattactagacaggaaataatttactgtgtctcagactttgcaatcaaatattgatgaacaaggaattctgtggcataatatctacaaagagggaagtctgtgctggtgaagttcttctatgtcacaagtagtagagcaccaggaattgcatttcattgccagcaatagcacagaaggtaatatgtctcgcatgggaaacaatggaaaatagcaaactcataagtaatatttctccttcttgtgattgcgtgataagctggcatacccgtgataaagtttcagatgatggagttccaagtagatctgttattagatctaactggtgcacaacattcctcccaggaaataatggtcttccggtgagaatttcagcaaaaatgcaccctatactccaaatatcaattgcaggggtgtactgtacaaacaaaatcaactgtcttcatgaatatgaaaatatgggaatatatctttctcatcagttttgtaaaaaacaaatatgacagcgcccaatgcaagaaggtaaatttagcacttctcattaagggaaatgggtgatactgtactgataaaagcctaaatacgtctttgtatcttgacacaagaagttgtatttggagaatttgcaactttttaagaaaaaattatatacaaatctgaaggacttgcacatttcaggaatgcacaatgtgttacagaatgaccagcttactttggagaaaaaagaaccacataattcaggagctcggtaccaccttgttgccacataatccttcaaattgcaaaccacagtataagtctatgaaaatcttacaggggaaattatgttatagagaaaataaagtcgtacggtccaaaaaattgttgaaggtgaatcattaaatgctacacgtgcaagtccaaaatcacaaatcttcagtttgcagtctgaattggccagtatgttctttggctttaagtcacgatgaaatacattagctgagacaagttaaaccatatatcagaaactcagtaatgattaatggttgaaatataacttccacaaagtatacagatttggaatgaagtggctgttggtgacaaggttaattagatgctaatttcatcactaacctgaatgtatgtacttgagagcacaaagaagttggtacaagaaaaaacggtgatgctctgggctaaggtcatgatttgcttcgataacttgatgtagatctgactccatgagttcaaaaacaacataaatatccctgaactcccttcgggtaggagggagcatgatgtgcttgatcacaacaatgtctgggtggcggagaagccgaagaactttgatttcccgcagaatgcggatggcatctgaaacatgctcaaaaacatcattgatcttcttgattgcaactctctccccagtgtgagtatctactgcagcagcaactactccatagcttcccttgccaacgacctcttgaatctgatattggcttgcctccccgtattccgtaaagaactccatgtccgatgttctctaaaacatcacaatttcccaaaatcatatagaccatcacagaatagaaaaaatgtgtatagagcatgtgagggaacattttaggagtcctcaacaatccagtaaaataagacaatcaaaaggaccaaaaagaaagcaaagcagcattgcaaattaatcgaagttgacataaaataaactgaaccagaacaactgataatttggaaactgtaatggcacacatcaatatggcaaaagtagcttcaagcaaatgacatgcataatcaaaacataaaaacaggaaaggaaaaatgttattgatcgatgtcaatggtcaagatcagtaacaaacatagttaaatcagagcaatgcagttaagtcaaagcaaaaaaagatctacatatagatgaattgtgttcacaagctattacaaaataaggcaactagaatcaggtggaaagagaacgagaacgagttcagaccaacgatcgaagatgtaataaggtgattcgaattaggtgggtcgtcagtgttccaaggccaaaaatgctgtccggcaccgcaggaagcaaaatctgatttgggaagaaaaaacaggggtcggatttctaggtataacaggtagctgcggtcgtaggagaggggggattcgaagattatcgaagaatgaagaaactaggttaggagttcggagagtggggaaaggggagggataggcaaaagggatggatttgtccaaaaataatgtgggcccacatcaatttttccctcaccagtatgttgtgcacccttctacgctactagctccttgcaccatattgatggagaactaattaaattaaacttgcagcttagataaatgaaaaagagtaaatgtaacgtaagagggatgtatctttcatcagaagaagacatgtagcataaaaaagatttggcgaacacacgttgatccaaagaaccctaagtgcctaaccattgcacaattccattggttcatatcatctctagcctccatgttagagtcattagacctaaacaagaatttgaataaaattctaaaatatttcgacattttacattggatagttttgcaaaatgtttcagtttgtaccaatcaagactggatttctttgaagatgtgtctacaaagagactgcatgcattgattcaacatccatacagtggtcaggatgcactatttctagctacaacaaaatgtggaagattaagtaattttaatttgtaatgttataacaatcaactctgttccacatgaacataaaatcaatatcatagttatcaccatgtaattatcgtgcaaaaaagaaaatcaaacaattggcagatcattattaagagtgcatcaaaacctttaaagaacatcaaggctaaattgaaattaattgctcaatctgggttttctaatacatctatataaggattttatgcaatatcctcgatactaatattagaattttgaactttgctaatccaaacagttagcatgagtatgcaatttatcactagcccactgtaccgcccaaaaattatgcttttcttcacaattttcattcatggtccaaaattctcgtggttattttggcgaattcaaagttataatagacagatacttgcactcaagtggacaagcactacgccactacctactattgcatcatccccctgaaaagtcatgtgttgccttttcatttatcttagatatctactatgaactaaggggcaaacatccattcttgatgcaaagaaactggcaggtgcattattcctaactatcgtcctttccttatttacatccaactctgcaaccatatctcacctatcatgaacaaatatctcatctttcatgaagctcctaagttcccaggtcctaaccccctacacggagacacaacagcaaatgctgtttcttgttgctgccaaagcagagaacactacaccctgattaccaactaagcaatagtcatccaatcagattgcagcagagagtcaccacccccttccacaaagcttcgatgtggcatatgaacaattgaaacaggatgcattcctcatccacaggaagggagatgatttgagcatgttaagctccacagcttagaaggttgtgagcataaaaatcaaaacacatttgatgcagtgatttataaggtaaccaatttacatatatgtaaggaaatggagatcagagttgcttaaaaagaacaaattaactagtcgaaatagcgtgaaggcaataacacaagagaagtaactagtatataccttgctcaataacaaatgagccccacatgaaggatcattagagaaaggaagtacacgattagagttttgaactgcatcgatcaaaagtaatacaactgcccaagcatttcaggaaagtggctgaggtaccttctgaatgctcatggtatcaacagaaagataaacagcagagcaagtaaaaatagcaaaggccagcatctatgctcttctccttataattatcatgggcagagtgataaagtcagatttcagccaaacaaaaatgctataccctcaaggtcaaacttaataaattaagaagttggatccaaggtgcaatcaagatttgctatcagtagaatctgtcactgccaacgacatcagaaagacaaggacaccagagcttctgccgaactatccaagcaaaaaactaaatggaacgtgtacggaaggaacttagaacacatgagataaatttgacctaatgaattaatataataaaaagggacacaaaggtttgagctccaaacaagaaataggagaagtgcaccttcgtgaagcaagcaacagctaaaacctatcctgtgaaattgcatggtcagaatagccatagcccaccacaattgacaattctacagaataattcttttgccatggcacggtaagaatatattcaagcacttggaaagcacaagcagagcgggagaaaagatcatcctgttgcaaaataccaacaccagaagccacctaacagacagaaccaccaggaagcaaaattggaataaagcatcaaccaaatccacttgaaggcgagtgtttttatataaaaaataagagcaattctacggtccttgaggaccatgagatactaaaattttagtgtaaaatttggtatctcatggtaccttatagtacctaggtaccaagaggtaccaaatttacaatagaaaaaaggtacctcatggtatctcttcaaggaccgtaaaattgctcataaaataaacaaagagaaattttggataagaatagagctgcgcgatccttgtatccaagaatgaaaaacagtgtggcttttagcgaagaaacacacaagacaactattcttcgaaccaagaacccatcaaaatcataccggaaataagctttgcacattgtgaatgggaaagtgcatattttccctacaaggcccactaccacatcatgctacaaattgctcgagctagaaggggttgctccaattgctaatagcatcaaagaaaagctaaggttcttacttgctaccactgaatttgaaggaattgttctgctgtgccaccaccaccacctagaccaagggaggacacatggtaggaactaaaacaagcagacagattgccgtggaacttgaccaacggaagaaacatggctggcactaaatcaaacagtcagattgccttggaacttggaggcaatgccacacgtcatttttttaccgaaatttcagagcaaaagcggggaagctttagaccgagtaaactcccggcgcgaccaactgaacacacaccctacaagtcaaattcgatcgagttcacacccttcaaccactcaatcgcatcgaattctcgtgaaaaaaaaggccagaagaatccatgaaaatggcagagacgtgagcttccacccatcgtacagcctgtcaattgatcaacccggaatccgagaaacacgcgagggttaacagcatcaccagttcaccaccacacaactgacacgaggcgggcaggtgtgaacacgaacctcgttcctgagctgggcgtcgggcggcggcggcgagttgcgcgcagggacgcggatggcggcggggagcgcgaaggggcccgggaccacctcgagcccaccgtcgccgccagggtggcgcgccagggaagacgagcgcaagggctgataggcggaggcggtgcggccgcggcggcggcggagccatctgcggacgccgtcgacgacccctcccccggccatggtggtggcgctgctccggcgacgccaagcggcattgcggaggcggcggcggctgctcctcccccggggttttgtacgccgccgcggcggggaggaccgcgccggcgtctcgcgccctcgtcgtcgtgagaatcgactgattgactgacgagtcgtcgctgcggaaaaaatcggacggttttgggcgagtattaggctcatggacggatgcgattgacggagatgcctttctattatttttcttttttttaagaattatacggtataacgagacactcataacacacgcacactcgttcctatgaacgcacgcatgtaaactctaccactatgagtatctacgaatactagaccggtaaatccttaagattaacgaagtaaccacagacacttgctagatcaaagaaaaaaacatatttctaaaattaaacacaatttatgaatatagacatgcaaatgtgcaattgcaagcatgaaagacgtataatgatgtcatttacttctacatagataaataaatagacaacataatagcatctacttctgcacacaacgaacggacatacaaaatcctctggttaaacgaacagacaacggttagacgatcatcaatttgataatacctcaaaaatctcaagggataatcaaattggaatggagggaatttttttttctccatcacacaaaagaggtatggcacacttaccactagacatataacaccgcaccctttttttaaccaagcatgcaacattattagtttttattttgtatatgaaaagaaaatgattccctcgtttttatacgaagttaaatatttttgttttcaccaccaacttttagaaatttgtgcattaaaaaacatttcttatggccttatgatattaaactatatgattttctaaaatggatagtcaaatatataaatatttgacacgaaacaaatttagaatgacaagtaatttatagcaaggggaagtacatttttacttttttcttttacattcttattatgatccgcacaagttttaaatttgataggttatcttcgtaaacaaaaggttgtcaaatcttgagttagacttgatctaaagacaaatatcatccactgaaacttgattagcagacacaccactcagtaattctccataacaaatcgcattcaagcagactagcacgcacaaatccaaaggaaaataagccacgactaggagtcgggcgtgcatagaacggcagatgcccccatccttcaatcacaaactcagaacacgccaaaaacgtcaggggagccaaagccacttgggcacttggcttgacaatatccataacttacaaacattgctcgaattcctggcaaagaaatcgaatcaatgcttggtgttcatattgcctatacaaaatcagatcagggcaaaagcactagtgcacggaatctgcctatctggagacaagtagttcacccttggggagtttctcttggtggatgtacaaaattggcagcagctgattgggttgacacagcttcacgctgccgggatctgatgggtgcagcggtctatttcttcgctggggccttgtgaagcttatcaaagatgggatgtctcaggacttctttcgcagatggccgcctcactggatcaggatccatcatggactgaagacaagcagaaagagaatgttaagttgcatgtcggattgcctgttataggagagcagatgcttctgagaaacattatttgaatttgcaccttcagcctaccagctagtagctcatgtactcaaaggttggtacctcagtacgcaagatatttttgcataaaatgcatatgagagcacattatgcttaaatgcttagttgaaccaaaataacagttagtatcacacatgctacgagtgtgactagacgtgttgggaaaaagaacatgataacaaaacagaaagatttaaccaaagataaagttaactggaactaaaaggcagaacaaagtagtgacagaaatgataatcatacccaacaaaagaacatttcttgtcttaaccaactatatgctaaaaatagcaaattgtactagagcagattcagcaaatgactatttaggtgttgttgattttagaaagagatacagaaaggccaaaaacaggccactaccatattctatagaaatcactttagtgtatcaaaagtgaccaattaatacttcctccgtttcataatgtaagtcattctagcattgcccacattcatatggatgttaatgaatataaatatatatatatgtatagattcattaacatccatatgaatgtgagcaatgctagaatgacttacattataaaacggagggagtatcatattctacaatgacttcatcagttggaaacttgaaaatatatatccaacgtcagggtgcttcactgcttatgtatcataaactgaagcagtatatcaacaaatcagtcttttagttgtggaaacagaaagtctaacacaggatgagaggaagactttcccttcaaacaaattaaataaaagaaatgaaaagataagaaattcctggaaatggagcttctactccaacatggggaagatactgggatcgtggcaattaaatgtgtttcctctgatataaatagaggcaaatcaaaataagcagggacagacaagttacacggtgttgtacctttattaaactctgaaattgcattgggcatcctggaagcaacgcaatttttccctcccggagacttgtgaactgaggtccagaatcaggaagctgggtacctcttataagttcatagatagctgccccaagagaaaagatatccaccttgtcaagatgctcatacttgtcgttcagcatctctggaggcatataacgtgaatctccatcttcaattgccaaactccgatcaataagtgtagcacaaccaaaatcaccaagcttataaacaccatttctgacatatatgttatctggcttcacatcaaggtgtgcaataccacgttcatgaatgaagtccaagcctttgcagatcttcattttcacaaaattaagtttaatattaataggtgagatacacatggaatgtatggagaatttggaatgcaaacaacacatgattacaaaagctggtctataatgagcttcagagaaagacaaacactaccagcacaaagtatatgccctttcccacttctacaagaattctctccaacactaaaacttgtgcaggtaaatagtatttgtgaactgcctcacgcaattagaatacaccctatattgtggctatctgtataccatagtaccatacctccattatggagattaggcttcagtatttgtttgaactggatgacgcccatcaacatcaagttgaaatatgttacactcaccaagttaaaatagaagatctaagacctgtttgtttactctagcatgatgataagtgttccattttactttccaactgcatgtgttgtataccgtgtttgtaagaactaagaacccaaaaacttgcatgttttactcccaaagaccagaacatgcaccttacaaacatcatggtcaaataagagcaatcaattgctaatgtaagtggataacagcagagaataaacattatccatgaataatttgagccttcagaaagtatttaatatatgttgcagaaacttgtttggatgaattacgacataatattgttattatatcataactgcaacataacttagctacgcgtactgatccaatgacaaagaagaaacaaaatgaaccagtaaacaataagagtaactattgcgtacctggtacagcagttccagggcttccccacatttcagcggctgatttctatccatggacaggcagcggtcacacagttccatttgaataaaaagctgtttgttctcaaaccaagaagtgaaatatccaacaatgttctcatggcaccctgctaagacatgtaacagatgttataaccatgtaagaaatatagctgaaaatgaggaggttatagttaattttgctacctaaggctgccaaagcttgaacttccttcactgcttgcctcctgcaatgagagagacaacatacaagtatgcaacattagtttttcatggttaataattaagcataacgactgctgcaaggctacctttccctgtcattatgcagttgcctgatactccgttttactgcatataagcagccatctatcctcttcagaactttgaacacaacactgaagtttccacgtccaatttgctgaaaatcaagtgtgctcataagcaaaaccaacataaaatggaagtgtataacctgacacagataaccaatacatatccaaacttccaaagcaaacctcaatctcatggaaatcagttcgatagcgtgaaaggccatcaccatcaacagaaggagaaaaccctgcatataaaaaatgtgtattgggagatgtaaggctacacggtactgacaaacagataaatgatagttttgaggggatgtatcgagatgattatgatacaatagcatacaatgcatcaaaatgctacctgatgatttgcattgtctcccaccaaaaacattatcatctatttgatgatctgtattgaggtatggattcctgatgcatggtggaggcatcacccggcagcgaagagccactgccgattgggagacataactacctctcttgtgcgaactagattccttcagctgttcctcctctgaatcatctagaccttcaaactgaactggagcaatccactggctatcaaaaatgtcattggagccaaggcctttgggggaacaatctgtaagcattggcacacatccaattatacagagaataaataaacaaagggagcatatcaaactagtataagtgaagtctcacctctcttgtatctcttgctcctacagactgatttctctggagaattggggcaagggatattctcctgcagatgaccacagaaacggacaaaaaaaatcagcaaaaattaaagtaaagctcaatatccatttctaatcgatcaatctcgcatcccagaaactaaagcgccgcctttcccccaatacccccaaccttattggcgtcgaagccgctcccgagctgcggcgcatctggcgtgatgtaatccggggtactgcagaacagcaagcaaatagatgaagaaatagggttaatccaaccgcactccaccccctcaagcacacgaaagcacagctcggagccggatcgggaaccctaccagaagaaatcctggctgaggatgccactatccttctcctccacgacctcgtcggcgtccattggcgtggcctgcggctgcagcggaggtaggggcggaggcggggtcgggtccgggtcgcaggacccctcgagcagctcctcgaagggcgtgaagggggtgcgcgccgcggcggcgccctcgcggggggcgtcggcgaggaaggagaagagggagacgtgctcgagctgcagcgacagctcccccgacggcgacctcccctccctctccctctccctctccctctccctctccttccccgccgcagccgtggcgcggcgggacttgccgccgcgcggccgcggggtcttcgtcctcagcatctccccgccgcgaagaggagatctccgcctccaccgagctcgccgcagccctccccctcgtcgccgccgcgtcgcgccgcctcggcttcgcctccgccacttcgagaggtgtgtgggttttggaggagacgaaatgtactactaccagttgtagtgggaaggaagaaaaaaaataaatggaaagaaatggattaattaaaaattgaaatgcgagcgatttggcggtggaattggcgggaggagggggtggggggttcgccaattcgaggggtggaaatggaattggccgcgtggcactcgttttttctttctcgatttgggcgttggtcgcatgggccaaaattgcggcctttgtcacatttgtaaggcctgcgaaacgaaaaataattgggccacaatcccgggcccttctagggctttttcgggttaatccaaccccaagaaaattaagaaggattttgagagatataattctacacctatcatgtgtagaattatttcccctcaatcatttttccttaaggattaatccaacaaaggctatgaaaaaagagctagagtttcgcctgtcataaacaagggctaaccgtccgaagcattgttcggttatttagggattgcagggtttaaattatctctttaaatcccctaaattcttttgtggtttggattaaccgaataagatcttatgggtatttaggcccacatatcagggtcattatgagagcccaaacccatgatgtcgtcttatcgttttgagtacgtatcaaagataactaaggtgtgtttcatttttacatacgtaattgttatagaagtattatttaggccatagttctaaaaggattatctctaaaattttttatatcatactttctctgtctaaaatatactcccttcgttttacaatgtaagtcattctagtattttacatattcatattaatgttaataaatatgggaaatgctagaatgacttatattgtgaaacggatgaagtatatagtagcttaatagtaggtggggcatcatcaagtcctacgagtctagatagcatcctgcccggattgataacatttggaaagggtgaatagataacttttttaaagttatttattgtttgataacaattaatttatttgtatgagcaagctttgtctatctataatctacccaattatctggttagaacaccgttatcttctagtgtaactattttcaattactacataggatacgcatatgtagctattgggaaatcatgccataatcaggttttgcaaagtcgcacgattatcatgtgcggtaatcttctcagttcttaaaaccgtggtaatcctcacgacaaccacacggttttcacagtaatcgcggtaaccgtcttatcgtgggggtgacattaaccccatccaaaatagtttggtgaactccgatcgtaacgtaatttgtctgttcaaagagtaaagttttttttccttcatagaagatatactacttagctaccgtatgaatcaggttaaaaatccctgtttgggaaacatgggtttattccaagtccctgttacatcggatgtttgatactaatttggagtattaaacatgcattaattacaaaacccatttcataaccttgaactaattcgcgagacgaatcttttgagtctaattacgcaatgatttgacaatgtgatgctacaataaacttttcataattatagattaattaggcttaaaaaattcgtctcacagattagctctcatttatgaaattagttttttattagtctatacttaatactctaaattagcatctaaacatccgatgtgacatggaagttttaacccccatctacacaccaaccttcgtggggcaacatcgcagtgactctgcgtcaacgtagtaccggggtagaaacaaacacgtccgccgccgggcgccggccagaaaaccggtagaaaagggaaccgacgagacgagacgagacgacatccatccgcgcgtcggcacttgacattacacgcggacaccgacaccgcacccaccaaactgcccccagaattcgtcgtcaacctcaactctgcacacgtttatacgcccaaacacctgtattctgatgtattttaagcctcaatttaaaatagattattgactaaattattgttacgtattagtatctgctaaattgtagtgatagattatatattttggtaaacaaagttaaaaattaattcaggacaagtggcctaagcggaagaaagttaaaaaaaaagagtgtttgttgacttgtaaaaaaattagtccgtttcaataattcgataaatagtatgagaaaacaatacgcataaatttctaaacagccagctcccaaatactagttaggtagttgaagattatattagttgtagttgttaggtacatgcagcaacgtgctctcgaggaaaaagaatacatgcccgatcacatgaggaagcgtattattgtagtggtatctgtgattccatggcctgtacgttttctttttcctcctttctgtaatgcaaaaactcgcaggggcatgtgaacctgtcggtgatcactgctggtggatttttttttttagataatgtagcggtgatcactgctgatgatggatggatactatgactctataagcctcataggttacccattattattcctaacaagtcaagacgtcttattaataaataaaagctaacttgtaaataaaacttttatatatttgtccgtagcgatttagaaaccaacgctaaaaattatacattgaatcttaaaatcatgttcgaaaatttaaaaatttactcttgttctgacttattagaccgaccgatgtttcaagcacgatagaagaggggaatggatgatggatcattagccaattaacaacgttctatcagtcgccttaaatacctagcttagctctcaccatatctcgtgtacagtagtacgatcagacttatcagaattaatgctcaagactcttgacgacgatgtagcagtacaccatcattgttgttgttcttgacagcttaagctaccattaggttgaactgttgaagtactgaaccatcagatctgactaaagcagagtgaagcggcagacgcgtgtgtacgtaccatcccgtatacaagatcgtgtgtgtttatgtacttgattagtatcatctatctaaccttcgtttgttctgatgcacttatcctcttttaattctgatcaaatgcacggcaccaaatgtggcaggcaagcaactagagtacatcgactgtgcagatctaaaaggacggataagtggataaccttgtactgtacaatatataagatatatagaaaaagtttcagctaaacatctgggcctcctttgaatggaacgaacagataaatggaaaaaatatataaaattttgacagtaaatgcaaagcagatgattaaaaacacacggaaaaaaataatcgttcgaagaaaaccgtagaaatcgaatgagacgggaaattcaaatgaaatttgccaacacattagagattttgctagtttttctttcaaaatattaatataattgtctattacatagaatttttaaagtaatcgataggactcaatccgtgcgtttcaaatgtcctcgtagaaattttttacaggaatgaaatactcaaaaatatcatttattttttacaaatcaagcttgtctgaacattataggggacgaaggaacgcacaaattccgccattttattctgtcatgtctgatgattgatgaatgatgaagatcgaaacaagtgtgaaacagaagacaatctttcatacatccttcctattttgttccatacttccactcggtttgaatgaaaaggcactttttaaaagaaaaatatcctcccaaaatagtgccctctggtagcaactttattgactcgttattatctcccctaaattaatcacatgttaatcaccaaagtactggagtactttacttctattttgagatgactgatgcgatgcgaccaggtccgggatcatcacatccgatccgaccccaaccacaaagcatgttggttaacaactgaaacaaaactactttgccctatcattaacccttaattaatcatccccttttgtggccccgagaatttagattatttaccatcaaatttacatgactcaacttttttaccacccaatccgtatgtcttctataatatatcattaggagtactaattagtataattggtaccactttctcagtttttcaagtatttatcatttcttttctcaatttgtattctttttcaagttttgtggactgttttgcccctgggcccacctgtcaggtgaaagggtgatttttcctcctcaggatcgatcgatccctccagcctccaggcgtcgttcgccaccaaaccccgtcgccgagcgccgttcgccgccaatcccgccgccgggcgccgccaaccccgccgttcgccaccacctggacgagcgccgccaaccaaccgccggcgggttctaggccatgcgccgagcgccaccagcgacgaccaccgtgcgccgagtgccgctcccagctcaacgcccccaacgccgagcgccgcccgcaacgtcgagtgccgcgccacgaccccaacgccaagcgccaccacaccgctgccgcccccgccgacactgtgcaagatggaggcgatgagcagagctggatttgtgcaaagttgtagttttcagcaactggaagatcagatagttttcagcacctggatagtggcaagtctgtagttttttcttcagtgtttcttcagtagttttcggtggggatgctgcagttgaaattgaaattaacgaggtcagagtgtctaaagtcagaggcattgcaggcaaagtttctgggacatatgttcttatactgttagattccttttctatggacaatagagaatctgatgacaatgcagtgacactggaagctctagaaaattcaggtggaaacttctcaagattttcacataggaaggttcttgagatttaaccagctcttcatttcttgctagagcaagtggagaggctgatgattctgaaggttgtgaaggggagggcatgatcgatgtaagggaaacgctgatcatagccacctctccctctctcccttcaaaccctaggcagcacgggggagacgtgttcggccggggtggcggcgccaggttgcggtggccggcggcaatgctcagcagtggggtggcagcgctcggcggcggggtggtggtgcccggcggcggagtggtttctcgctctagttgacgcgctcagcgagacgtgtgttaacagtgaaatttggtaagcccggagtagtcatcggcttagagccaacatcggcttcaaagtccagagattagccgatgagaattgtcaagtcgtcagttgtcggattcttgctatatttggttaaggaaattgatctactaaaggaagcttatccagaagagaccgaggtcaaagagaatgcggcatggaaagttatttattaattaggaatagtttgttagtttccttttatgtttaggaaaatgtgtttagtgtcctataaggactttatcttttccttttatctttaggaaagtttctttcttgtccggcaaagacttgtatcaacccatgggtataaatatgtacacccagggtccatgtaatctatcaattacgatcaatagaattcggcgcatcgccaccttttaccttttctgctttattttatcgtccagcgggacttggcacctgacgcggggttgcatcggtgttcgatctccggcgaagggataagtccaatgttccgtcggtccaggcaattgtattgtctacgtcggcgtcgttcaaggctgcatcagtacattcgacctcttggattgctctggtttggatgatatatttgcctacctatttatcatatgtctatgttaatctagtcttagcatatcaatttagctctatcggctgcttctcgttttagggtttctgccggtattggctaaatcgtgttgctatattagattagccaagacatctaccaccctgaaaatcagtcaacggcttgattgtctagatattgtgcttctttttatacttagtgctgcatcagttgagcttgatctactaagtcgtgcttagaaccataatctctagcctgctttttgactgccaataagggtttcatcggggtttcagctgatgagttatttggacgttgcatcggctcataaggattgcatatacatatgagttgcatctagccgatgacaacaaaggtttcacttattaatctaatcttgtggatttcatgacatcggacctccagccgatatgtgctttagtcttcggatcaatgcttattccatcatatcattatagccgattggtttatactggactatattattgttatattttattatcaacaaccgattgcctttacatcatcatctacattggacatatagccgattgcttacaccttatcgctatcggctggtatcggcatcggctattatcggctatcggctggaactactccatcggcttatcagccgatcggctgttttgatctactatttgcatatattgtcagttgcaggatcaaactgactggcacgcccgcatctcattaatctttggacctgcacaggagctaagcagatctcccagaccggtgtgttcgattttttcatcaacaacgacgagacagagagattgatcgatccagactcagagatatatctcaccctttcacctgataggtgggcccagggggcaaaacagtccacaaaatttgaaaaagaatacaaattgagaaaagaaatgataattacttgaaaaactgagaaagtggtaccaattagactaattagcacttctaatgacatattataaaaaaacatgcggattaggtggtaaaaaagttgaggagtacgaatttgatggtaaatagtataaattctcgtgggccccacaacccagcttcctccgcctcctcggccggagcgagccggccggccggccggcgagccgccgctcgtctccgccgtcggtggtaggtagccaagccaagccacgctgtcaccgaggcggtcaacgagacgacgtggccaccaacgcgcttccccccactgcctctgctgacacatgcggcggctgctaattactgggattattacttggtaaaccctgctactgcctccgtcacacaatataaaagattatgtttttttcttaataaattaacaaagtagtaaaagaacatgttatagtataaattgtgatggatgagagaataaaatatataagatttgatagatgaagaacaaattagcgcaccttccgtaaaaaaagaaaaatctagaattagatattagggtacgaatctaaacatgtgtatatctaggccctgtttagatgggactaaaacttttaagtctctatcacatcggatgtttggacactaattataaatattaaacgtagactattaataaaacccatccataatcttagactaattcgcgagacgaatcttttgagcctaattaatacatgattagcctatgtgatgctacagtaaacattctctaattatggattaattaggcttaaaaaaattgtatcgcgaattagctttcatttatgtaattagttttgtaagtagtctatatttaatactctaaattagtgtttaaatacagggactaaagttaagtccctggatccaaacaccaccccaaattcgtagtattagaatgtgtcacattcggtacagattgattttttatggggtaaatattattgaatcgtactaccaatttcctaccacggtatagatgaagtacaaagttgatatttcctcccacgaaaaacaaactatattttctaatacaacgaatctagatagtgtactagaaaatatcatatctaatattatattattttttttatagtacagaacgagaacgagtatgtgtgataaatgggaaataaagtatcgtcttaggatcagaaatctctttaggagtattatgaatggagtactaacctcgccgttaattgcataataatctggacaagtgatgcctaattaagccatagtttaatcggcaatttgcttcagatccagctcggcatgagactatcagaggcataagtgtcaaagcatctctcgagtctcgagtcttcccttctcagccagcttcgcctcgctcgctagctatccatctcttcctcctcttcttctcccttcccttgtttgcttggaaggagagggggaagaaaagtaggaggacgcggttgcgggttggtccagatctagggcaaggcggtggccggagtttgagctgggcccgccggcggcgagatgaagcagtcgatgcggagccggcaggagccgcggcgggtgagcaacggcgtcatcatcgccgccatgctgctctccctctgcgtcctcagcatcgtcaaggccagatactgctccacccccttcggtacgctccgcctccgccgtggcggcgcggcgctcttcttcctcctcctcctcttgatttgtgagttgggagtgtgaaatttggttgggtgatgtgcagttaagcccgacgaccagctacaggagcagatgaactccagcatcaggatggagaccgacgagccggcgaccatggcggcgggaggttcgtcctcgccctcgctagctctccggattgtgtgtgatttgtgctcaacgagtgcgttcttgaatttgcagagcaagaggaggacgaggaggaggagagctctggcggtggcggcgctgagcctgaggtcagcgccacccctgccgtcgtggtcaccgccgcagccggcggcggcggcggcaagaggaagccgacctgccgcatgacgagcaagcggtcggagcggtgcgaggcgagaggggacattcgtgtggaggggaacgcgtccaccatctacatcggcgggatcgacaaggagtggaagacgaagccgtacgcgcggtaccacgaccccgtcgccatggccgtcgtccgcgagttcaccctcaagccggtcaccgagtcgtcgccggcgtgcaccaggaaccactcggtcccggccttcgtcttctccaacggcggcttctccggcaacctgtaccacgactacaccgacgtgctcgtgccgctgttcctcagcacccaccagttcaagggccaggtgcagttcttgctcagtgggctcaagccatggtgggtgaacaagttcaacctcttcttcaggcagctcaccaagtacgacatcctcgacatcgacaacgacaaggacgtgcactgcttcccccggatcgtggtcggcgccaccttccacaaggacatgggcgtggaccccaagcgctcgccggggcacgtctcggtggtggacttcaagcgcgcgctccgccgcgccttcgggctggagcgcgtcgcggcgtcccgaggcggcgccacggggaacggcaagccacggttgctaatcatttcccgcaagaactcgcggcggttcctcaatgagcgggagatggcgcaggccgctgccgctgtgggcttcgaggtgcgcattgccgagcccgatcagcacaccgacatgtccacattcgcccagctcgtcaattccgccgatgtcatgatcggtgtccatggtgctgggctcaccaacatggtgttcctcccccgcggcgccgtcctcatccaggtggtgccattcggcggcctagagtggctcaccactgtcaccttcaagaatccggcgaaagacatggaggtcacctacatggattacaatgtgcagctggaggagagctcgctgatcgatcagtacccgcgcaatcaccaggtgctcactgatccctacgccgtgcacaagcaaggctgggacgcgctcaagacggcgtacctggacaagcagaacatcaagatggacatggacaggttcaagaagacattgcaggaggcgctcgacaggttgccgccagcatgagagcttgatgaactgatgaaagctcaagcccacgaggtggtggtggtggtggtggtagatagataggttggtgtatctatctgtgccttctcttgcttaacttatttttccttttgaaattctttttacgccttcttcttcctttagcaacattcatttgatctgttgttttggaaaagaaaaaaagaggatgaacaagaacatcatgttacatatgcctagctgatgagtaatttataccctttgtgattattaattggttgtttatttacaagtaaatgtcaagatacaaaattgtggattactagtaagtatcaaatgtgagtgtacctccctctaatgccaggggggcaaactgtattctcctatgccttcttcattgtatcaattcaattcatttcatccagtacattgcctctaccaaaccatgccaaaattgacctttcctctgcaaatgaaccacgattttcaacatataaacgaactacatttgatcttccattgtctcattagtcattgcacaacaaattagtagagtgatcagtcattgatgctagaacagtggatcaaaggttccatgttcagtttggcagatgattagtgccataattgggggataaataggccatgaacaggaccaggattctccctggattcaactaacacaatgagaatgaaatggaccaccattggccattgcctaccacaactacctgtcatggtggcattgcataagcaatggaaatatttcaactttgtcagttcctttctcttgtgaatcctttggtttgggaagagatgagcttccttcctgctctgaccggatcacagcaagccaaattcatagtctgattggcatgatgatatatcagaaaaagagagaattttttggccaacgaaggtttggctgatctgctcggccttagtcaaatctgtctctttcgacgaactgcgttgcgttgctaatttgtcactgatgacaactacttctacctgccatctcatatgtgagcctgtcagaaacatggagtgatatgctagtaggaacactagaagcttccttctgtttcctgtagggaagaactgaagaatggtcagcacatcgtcgaccgtcggatcttgatcagatggtatccgcgacgcgggacccagccatcagtggttgggactaggaattttgcccaattgcaatttggcatgatgaatgtgttgtcctttgtgaaattttctaaaggcaagcagggtttgtacttgtgtgagatgtgaaattgattgggtaataattgacttgttcatggatgattgagttttaatgggagagtgattgcaggatgaattacaagttatcggtcatatgtgatggtaggtaaattgacagggacaacacaagctgaagctgaagaaagaagaagagaacttgttcaggtcagcaactagcttgtacttgacactgaattatgaatgtgctggagcttgctgatggctaaggtgatggcattgtgaaattaaccagctggccagttgatttgcagctgaaataatcaatctctctcgtcagcatttgttgcttgtaagcaaaaatcaaccaccgacaaacaatatggaggcactgttcttgcaaaatccttttggcacaggccgggctttggagcttacccttggccggttttgaatcaacatgaattccagtcgaatttattcggaattggattagttagttccgacgttttttttttataaaaggaatcgagtagaattcagatagccatcctatattgattctcgggataatggagccatggactatactcccttcctgtcaaaataaattcactcttatacacaaatctgattagattcgtacataagagttgatttattttagtacataaaggatttccttttgaatgtgtgaaccatttgtcggtgtctgcttgagtacgaatagtgagtggctcatcatactcaagcacgatgacctcttaaacaaaagagcacgacgagacgatgcttgggatggcgttgaattgatgaattatacatccggaatggaaatgccgtcgtcggagaagcacacgaaagatgacatcagcattcccggccggtttccgccgccgccgtctcgccggcggcaagccgtcgtccgtccatacgccaccaacctcaatgactcgccgtcgtcaatccatcgcgtcgctttcacaacccaaccagtccaaaaaatccaaatgtccagaactgtacggccgcgttaaggcagaaacggatgattagccacacatacaacgaaagatatgattagcatataattaattgtgtactcctattaattattaaaaagtaaaaaaaataagtttatttttaagcgattttttatatagataaaacttgcacaaaatgtataaaatatatcatttagtaatcccttcgatccaaaagaatcaatccagattcatagccagagtttaattctttttaaaatgagtgaagtaatttaaaaaacatgctaatgaaaattgaggaagtagtcaatccgatcttcactgtaaaacggggcctactggttaggcaactacccaccaccatcatccatccaggactgcaatttctcaaattttcccacgtaatttatttaaagaccatagaaaagtttgtttaaagaagtttagtaagtactgtttagtaatgttgatgaagagagtttttgcaaaaaatgagctttgtaagggtgataacggtaatccgtaatctgacagctaaaagtaacacatccttatcagagaaattaaagatgttttcttttgtttggtcaagatgaagtttcgttagatgaaaaaggaggcagcatgcaacacaagttgaaagttcatccgaggaatcaagccaaataaataaataaaataaaataaaagcatcaaagcaaagtgaaaactgatgcgtgacttgtgaactgatcaaggcaggagcccaaggaggaaagggaagacacaaggaagtgcagccagggtggttcgacttcaactggtttccatatcccaggacaatgaccaggcaacaacctaaccatgctatccagctaattactccctctgtcttaaaatataagaagttttagagttgaatacgattattaagaaaagtaggtataaatgagtggtggaggattgtgattggataaatagtggaggtagatgagaaaagtgaatgatgtagggttgtgattggttggaaagagaatgctagtgaaaaagttgttatattttgagacaaattctgatggctaaaaattgttatattttgggacggagggagtatttccttcttgctatttccatttttcctttttcgcgcatacatcatcacacatgcacacacatccgtttacacacgctcaatagaataactttaataacaaaattattgatccacttgattttatagaaaaacatgtatccataactcagtggagtcgtatatctaggagaatgattctctaacctcatacaaagtctgagaaatctcattcaccctctctgctctctcctcgctcccaatagaggtctttttttttttgggggggggggtgttgtctagatatacccataactccctttatcgcacatataagagatgtatctctcgttccaagaatatattttctataatttatgatttcccattcttgtatataataacaaagacaagttatgtcaataaatatgcatataccatggataaattaagctatatctgtatgcatcccatgaataaaacaacccatatttgtacctcataatacctccaacacaactattatcacaaaagacatgccaatgtgatggcttattatacccaataattttgtgatggcatgttaagaattaagattccatccatccatccatccatccatccatcaaaatcaatgagtcggttcgttggtagatggtgatctaatgacaagccccatactaccgaccacctctgcgtcctcatatgcctaacaactgatgatgcttcgaattggttatggctaaagatgaccaatggcatagcatggaccgttctttttgcatcctatggattctggagacgatgacactcacaataccaaataccaaatgcaggttaaccatattaaactacgcttattgcgacgtgcaaacaactctggttgcatcagcagttttgcccctactgcttggaacacatatggttcttgcagggttaagaattataatacaaaggaatatactgcttttaaagattgttgaaatttatgtttgaacctgataaacatttgtcattttcatagagatttctacatttgaaacacaagaaaaaaaaagccttgtgctttcatgcttccagcacacgaagaacatcattcagattactcccttgatttcaccacttttgtaatgcttttgctatctatgcgtacatgacaaacacaaccttgcaaatcaaagcagacaaaagcaacgatcagaagctgcaaagcagctagtgatagggagctggatggctgccttttattattctctagaatcaattctattagtagtactgttcttattaaaagaaaaaagaggctccagccacacgatttttaggaccagctagctagcatcaagaattaaattacaatgatctagggatggcatcagtcagatactgatatcagtgctgaaacagctcccaagttagaaagtttcaagtaaatggattctacacaaacagcaacggcgtttcacataagctcaggaaagttcctccgttcaaaagcatcggataagcacagtacaaatctcccatcaattcagtaaaaaccgtactagttttcagtttatcagcatctcctttatcaattctgtaaccttgggagagtacgtctcctccaaaactcatctatttgcaatatctgcagttcccatttacagaaggaacccaacagatcattctctttttattattttcgcgccttatttagagaggatcttctcaggcagatttaagctccatatttaggagctttccagagcttaaatgccacctcatgtagaaagcgttcagcaagcatagcaagatttccaccacgctgttgattaaatagcagaatgaaattagttatacagttatactcctccgagacaaccatattaaacggaataaattaatatgtaacaaaacaaatataagctatttggctaagttaaacacatatgaatcacaatatgggttgaacttggaagcttaggatctaaataatggccagacagatgaaagaaaaaaaatgctattgaattgtaaggccacaacagtggcacagtcaaggccctgccagttatatgcagtgtttctgcagaagctatctagaagaattaaaactactgcactgtattcttgcgaagcatattcattcaggtagcaccattcttgtataattcatgaataccaaatttgatcatatatcccacgtttagattgaaattgaggatttaccctcccacatgtcagtgaccttagatgacccccacatgtcattggcacaggagggtaaatcctcaatttttgatctaaattctaaatggagggtaaatataaatgacatgcttgaatggatttataatcttatactactagttttgcatgggggacaaatgccaaaaaggtacgcagatgatcatcccagcagcttttgacagtatgtcgtgaaacaaagaattaccgtgtagtgctgtggcgtgcactgcacaactgcacattaactcaagcttttgggtatggctttcgccgaaaggaaaaaaaggacagttacacaacaaagctaattatacctatggaacagcttgcacacttatcttacacaacaacatgtgatgtcacacaaaaactaccaccaagatgaagatataactcttcactacatgacatgcctttttgctaaccaaaggatgcagcagtgtgtataatatgacagaaataatttactatgtaatgcagcagtgtgtagtagctaattttaacacagcagcaattttttttgaacaaactggcatcctctttttaataattctataagaaaccaagacaaaatgggagaactcaagtgctttgaattgtaaacaactcaaaaggcaaattcataagcaggatcatgagaaaatgatacaaatgaagtatttactaagtatttcacattttcactatttgaattttcagatcgaggttataacaagttgattatacaaacctttatgaattcctcaaaagagaacccttcggtcaaatcagagcgtgtaactccttcctgccactgtgctaacagaatcggatgatgattcctgaagaacatgtatgatagtaatattggtgttagtcagggtttgctattataaagaattggcagacacacttttaacgaccacattatgtcatggttaagtgttggcagatactaaatcaacttatctggactgatggctcaatgtattagattgggtttgagaaaaaaaaacatttcaaacttgatttcataaaaaccaaaaggtgaaaaggtggttgtaagctgctagctttcaagtataaagtacctaaggaaaaatatgatatggctcttggaagtcatgtaagccactgcactccattatatgcagcgaaagatcaacagtaattacatttggaagaccgtgaaactattcaccttacatatatagcagacaaaatctaatggaattcttattatgtgtaacataaatatgattactacagacaaaacatgctctacttggaaataactttttggatttcatttgcagcaaagaacaacacctacctaacatcatccaatgtatttcctgctttcatagtatagctctggcgtgggcgaagcaagttcaagtcagaatctatttcagtcgaagattttgagatggaaaactcatccttattttcagcagcagacccatagctcaacatcacagatacaagaatacgggaggcgatagctgaacttatgggcgccgcttccatgattgcaccaactaatttatcaagccgatttagatcagtcttcattcccaattttcccaacttgctgtttgtattctccatggcaacatgcagaaacaccagatcaaattcagatgtctcctgaacattcccctctgaaaatccaagcagacttaacgcctgggaaataattccagcctccttagaagcagcggaagatccagattgtgcaactaaatcttcagtcccggatacatgaaaaccaagatttgctgcaaaagaactaacaagggggcaattggtgaccatggcagctctgatccccataaacctgacattccaaataccacatgaaagctagttagacctaattcatgaacaatgtaacagaaaacaaagcaaaaatcacacacatccaacctctcagatagcttgggaactgctagttgcagtggatccacctgggcagtctcttgaccagttttctcagtctatcacgcaaaaattacaatcagcactacctactctaaattctcgcacaatcaaccctcctaagtgcgaaccggtggaagcaagatctcaccttagcagggaagagatcatcgtacacgtcgagcagctgcgcgagctcaagaatcgtgctgtcacgcttctcctccccacctacaacgaccaaaacaaggaaaatctccattcggtcagagcagcgagtagaatcacagagagagacgacgcagaagagagaatcgctggatcagtagtacccactcgcgagagggggcgagcggagggagaggaagccacatgacgcgagagacgcgaaggcgtcgaggtggctccctccccctcctcctccggctccgccgccgccgccgctcgccggagggagcagcgccgcgtgccccgcggcgtagagcaccagcccgcggctcggcttgtccgccattgctgcacctcccctttcctcctctcccccctcctctgctttattcggtgggccccagacgtcagcctcacccccacgtgtcaacctcccgaccccacgtgtcatcgagatcactatactagcccggcatgtgggcctaactgggccggcctggcacatgggctgaattgggccgcataggtgggtcgcttcttgggcctctggttcctcgactatacgtatacaaaagaaaaaaaaaagaagagaaagagagggagaggagaaaccctaggcttggttggctccaagcttcgcagccatcgccgcctcggcataaacccttctactccgcagccatcgccgcctcgagctgagcttgagattcgcggggggcgcagcaatggccgggaagaagaggccgccgaccgcgctctccgagcccgaagccgccgccgccgccgaggaggaggaggccgcagccaagacggccccggctgcggaggcgccagcgaagaagaagaagctggccatggagcggaagaagcagcggaaggagattgacaaggagaggcaccgccagtccgctgaatcggacgccgctgccgctaagccgaagcagccggcggaggtggcgccggaggctgcggctgcggctgcggcggcgcccgtggctcctccgcctgtgattccggtggtgtcggggcctgggcttcacatgaacgtgttcagggacctggcttcgcctgaggcgtcgcagagggaggccgcggcggaggcgctcgtggcggagctcaggcaggtgcaggtggcgcacgagaagggtgggcggaaggagggggagagcgaagcggagggtggagatgggtcgtcgaggatggaggccgagaaggacgatggcctggagaactgcgcgccgtcggtgcgttacgccattcggcggctcattcgcggtatctcttcttctagagaggttagagatgcttttccaattccatgacgaagtttagctttgtgtattgcattggtcatccgctacagttagatcgtatcttatgcttgggaacttggtttgcagtttgcaaggcaaggattcgcattgggtcttgcagttgtgctcgaatcaattcatgcaatcagcgtcgaagcaatcatgaagttgatacctaatttgttagagtattcagcttcaatgaggggaccggtaattatgatgattagttactgctgattttttctgcctattgtgatgttaatttgtttactcattttttttcatttttcttttgtaggaagctaaggacaatcttttgggacgattatttggttatggatcaattgttaggtctggacgggtctcgggacagtgggcacatgaagaaggttctcccattgtcaaggattttgtggatgaggttatcaaacttggtagcaagaaacgatatttaactgagcccgctgttgccgttatcctggatttagctggaaaggtacgcgcctcaggcacatactgcactttttatgactatgctttttatgcgtgtaatctaattagggacattaaaatttagttgaaggtctatcgcataagaggttatcattggcatccaaatacatttaaaattgttacagaaaaatgaccagcaaaaaggacaatcttaaattaaatttctcaaaaggtgtaacaaagcaaccattttcataccacctgaaaacattttttatgaaaactttggtgtttcagtttgcatgttgtacttggcttctgtttaatagataagatatccccctgacatcaatggtactgccttttggtttgaaatcgacctgtgattatggcaactttcactcttattttgtatcaattatgttgaaaatcacaccttgtgatgcacataagtttggttttggagtggatatgttatttcctcagttgtcagttgtaccatatttggccagtgacttgattcaacatttgctgaatctttctacatattgcagctgccagaggaagctataatatctgagattctggaagctcccagtgtgcaagattggttcaacagagctgctgatgctggagatccggatgcactctatctggctttgaagttgcaagagaaaacaaatgcccaggagatatttgggaagcttctgccatatccattcagtccagagggtttttttgcagaagaacatcttctttcaattgctgcttgtttcaaggtaatttgttttagtaattaatggttcaggagtaacattgccaaaatctaacatagcatagctcaatataaccaagatgtatttgataaatataattcattttgttatatcaaatttctatatgctctatgccattcctttccttatcttttgattggtcttctataaatctttcaggaatccacattttgtcttccacgcattcatagtttgtggcttgttatcacggacatgcttgttcgagaggcagcttcacagagtgatattgccacaagctcaagcaagaagcacaaaaagaataagaaaggcagctcctctgaggatacaaaaaagaatctacatactttctgtgaggttataattgaaggaacattgctgctatcatctcatgataggaagcatttggcatttaatattcttcttaatctccttccaaggctatccccatcttcgattcaagtaattctgtccagcaaggttgttcatggtttgatggatgttctgtcaaatgaatcgtcatggttgcacaatgccggccaacattttctgaaggagttagtaagtttagtgagtgatgataatgatcgacgtgttgctgttattactaacttgcagaagtatactggtggaagatttgactgcatgacaaaaacgagaactgttaaagatttggttgccaagttccgaagtggtcaagattgtttgtgtcttgtgcagagtttgatgtcactctttgtagatgaaagctctgttacagacgaaccatctgatcaaagtcagacaactgatgagaattcggaagttggttcaatggaagataaggacctttttggccaagggagtgctgaccttttgaaaagttggatagtgactacaattccttgtgttttaaaaaatctgaagctgacatctaaagggaattcactgacagattctgaaatggttaagtgcattgaagaaaaatttctagtgcagactgaggtattgaaattccttgcagttcaaggtcttttttcagcgtctttgggatatgaggtgacatcatttgagctgcacgagaagttcaaatggccaaagccagctatatcaacatcaatacgcaatgaatgcattgaacaacttcaattcttaatagaagatgcacaaaaggatgaagctttacacgttagtgaggttaagtctaatgacctgggcttctacttcatgcgcttcattaacaccctttgcaacattccctcagtttcactcttccggaccttgagcagcaacgacgacaatgcattcaagaagttactggatgtagaatctctgcttttctatgaggtttgtaactttgctattattcaacctaacatattatagttaactcattctgtggtgtaacattttaaaattttaatttgacctacaaggatggcctcactgttcctgtttccggtattgaaactatccctgactgtatttatctggttttaaattgatgacttttgaacaccctaggaatcataaaacggtgtcagtgtttattttaaaaataaatcagaggtcccaacaactgagagtgtgcactaaggactttccttaaaaatctagtctcttgaatatggatcgcctcttttgatgcagtacggcttacttgtggcaatggtgatttcttttggccgttctagatttaatcttgttggaataaggagttcaaaagtatagaagcagggatttagtttgaataatggttctgttcattttcctggatatttcatatagttcctttttttttcccatcatctaatgtctgtggttcccttgtgaataggaaagaaaagttggccctggcttggattcgactaaaatgcatgcgatgcgttatctccttattcagttgctcctccaagttcttctccatccagatgagtactgggaggcagcaattgatgtgactatatgctgcaagaaatcgttcccttccatcgttcagaatgacaaatccagtggacagccatctaatgagggtgcggaggtgtttaatgaggatgggccaggcaaatctaacaaggatgggccggaagagcataatgatgatgcgtcagaggattctaatgaggacgggccactagagtttatggatgtacttgtccagacttttctttctgttttgccccatgtgtctggccctgtatgtttctccatcgaacaggcaagtaacactgtacatgtacctctagtaataggaggttttccatttttgaagaatcgtatgttgatgataataggaaataaattaggggcatgcagttttaaattatctagtatacactcctttctaaacagccattttcaattgtactagcagaaatttaatcctagtaaatagccattttctatcatactagtcgaaataacaaacatagtaaaatcaccagtacatatagattgtgctgccctcattttcctttcttgtttctgtttaatggcggttatttgttgcttttcttgctaaacatttgacttggctgcgctaacttggtcttttatttgaatcaacaggtcttccgtgtggtctgtgatgaaattacagaaacagggcttcttgacatgttgagagttgtgaagatagatttgaaaggttctcgtcgccagtcaggtagtgatgatgatgaagatgatgcatgtgttgacattgaagatgatgatgaaaccattgtggaggacgcggaggttggggacactgattctactgcagacggactggatgaggaaatggatgatgattcagctgatgaagtagatgaaggtcaagatgatttgaaagaatcagttgcccatgagtcaaaggatggagatggtgcagaagttaccaaagatggggatgactcagatgattcagatggtatggatgatgatgctatgttccgcattgatccttacattgcgaggattttcaaggagcgcaaccttcctggcagtgaaactaagcaatctcaacttatgcggttcaagctccgtgtccttacattacttgagatatatcttcagaggaatacaggtacatttcaaatattccttcatattttcattcattttaagttgtatacatgcatataatagtcaaaggatactctaaaaattgatcattgccgaaaatctgcctccaaaatcacatcagggaattaattgttactgcaaggttttttattaggaaatggtccagctttcattcagttttaactgtagtatttacatttgttatatgttgtgtaaccttctatgccctaaactccacaggaaataatctggtgctggaggtctattctttcttaatgcaagcttttgtgaagtcacatagtgctgatggcagtgagcaattcaagcaacgtataggtggtatattgcagaaaaggatattcaaagccaaggattatcctaagggtgatggtgtagagattagtactcttgaaagtttgctggagaaagctctaaaattggcatcgcggtcacgatacaccacggttgcttctgtagcccaaaatgctgcattttggcttctgaagatcatcaattcaaagagtcattcgaaacaggagcttgcgagtgttgtcgaaaagttccaatatatattgaccgactacttcaacaacaagaaatcgcggttgaagcttgggtttgtgaaggaggctgtccggaggaatccttgggtaggagaggagctctttggatttgttctgcagaagattggatgcacaaaagctgaatatcgaagagttcaaacgctagaattggtagactgcatactcaaatcttgggctggtgatgattcgagtgcatcgaaggtgttgaagaagcacctttctcagttgtgcgagctgatacaagaagttcttacaaagatcccagaaaacaagtcacgtcgtcaagaagtccggagattttgcacccgagtattgcagacagtgacaaagcttaacctcaaagaccggtttcagaagaaattgaatcctgaaacgctctccctttgtgaggcacagctaggagctgcttttgttcgctttcaaaaatgacattacatttatgaggagactgtatttgttccctttcgaaaatgatagtcactagaaatattttgagctgagctaagttttgttcctcatttcagctacatgagtagattctatcaaattaagctgtatcggtttttgtgacagtatctgaaaggaaaagatattcactgttatgttagcaatactaattggtatagacgcgcgcagcacagctgccatgcaatttgctcatgaattctttgcctgcagagtttgtttgatgattctgtcacgaattgtctcacttgaaccatgcaaatatttgctgtacgcctgtacatggataccttgtgtagtaggttcacgaccctgtattcggacacatgctatttccggtttttatgtttctaatagatgatgcactcaaattttgaacatatatttatatttaagagtaaatttcataaaacaataggtattttacacaatttatcacaaaactacatatttatgagcttgtttcacaaaactatagatattttgtacaatctatcataaaactatagatttaagaacttctttcacaaaactatatatttagtgtattcgttcatcatagaactacacatttagtatcttcatttatcataagattatagattcagtgtctctattatcacaaaactatagggtttaacaatactaaaacttagttttgtgataatgaagacactaaacctgcagttttgtgataaatgaagatattaaacatgtagttttgtgaaagtcttcattatcacaaaactataggtgacggagcgtggggctcctcaccgggagaccgcgcaggcccccctttgccggttcggccgggggcgctaagtgaggttcttcgccctcgatctgatgaacgtcagcgagagaggaagtgcacaagacacgggcgacgtagacaggttcgggccgctgagaagcgtaacaccctactcctgtgttctggtggatctgtgtgtgaaggaatacagagagccggagagcgagagagagttcaggctctagcacccattcgccagagtcccaactcctcttcctctttttttcctctttctccccctttttccttcctcctaggcctgggcctcctttttatctggtcaggggtcaccacatgggcctccagctgcctaagaaaggaaacatgctttttacaatgagggctagtctacagccggaagtgacctctgacaagcagagcccacgcctcctgccccgctcgccagcttttccggtggacgcccatttcaaccttcattcaatggccagcgacttccttgccatgcttgcgctgaagcttggaatggatttgaccgggactgacataccaactccaggagttagcacgccggctccggctagggacgagagccaggaagctctcatcattccgacgggacggggcgaggcgtgtgacaggccgcctgttgccacctaacccgcgatctgaccggtctgtgaccggtcacacaccgcgaccggtcacggaccggataagcgtgcgctgcgccgcattaaatgcggcgtggcgcgctcgtccaacccgctataaatgcggttaggtgagccccgctgtgctcatctaacccacacacgtggcgccaaaaccacaggaggtcggggcgccccagccctcggggccgaaacgggggcgccccagccctcggggagacagagggaggggtggccacgtcaccctcgggcccgacccccccgagggggtcaggccacgtgggtgaccgcggctacccaagcctctagtcatgatacccccggccccatgtcaccgacagtagcccccggcgttacgccagggcgatcgcccccctcgagggaagcgctcgggcgtgacgccactccttaggcccggtgataggtggggcaggtccctacaggcgggcagaaaacccagcggtcgcaaatcgcgcgcatcggcaagggaaaaccgaccgacaataatgagcggcctctttaagaccgctacattactcgagcagcgcgcgaatcgggacgagccggttcgtttcgcctggagacatgatgatggcgcttttcgcggttggcgagcgtagttaatgcgcgcacgatctgtcccatctcaaccgccacagccgcacatctgccgcgtgcgccgcaaacgggcgagtggggttagtggaggcgtgggcgcgagaaacgagggggcgaggtagtgggcgcgggaagcgaggagccgggcatagcgttggcaagggtgtaaagacgccgaggaagggattcgtttccttcctctcgccactcttccccttgccttcgccacttgtgctctaactcttcgtttcctgtgccctacccttgccgcactcgctcgctctcaagctcctcctccgccggcgtcatggcacggggctccgcaccgctcgacggtagcgtgctgccgccttcccgcatcgtgagcgagaggcaggctgggctgccgcgccgattcatgccggaatctgccactggccgggaggtggtcgcgctgggcgagggacgcccggcgccacactacccggggcggtccgtcttcttcctctctttcgcaatggcggggctggtcccgccattctctatttttttcatggatattctggagttttatgatctccagatggcgcacctcacccccaacgcgataatgacgttggccatcttcgcgcacctgtgcgagatgtttatcgaggtgcgcccatctctccggctgttccggtggttcttcaccgtacaaccggcgtcgccgccgacggtagtcggtggctgctacttccagccgcgggggcaggtgctgaaccgctacattccttgcgtcctccgcaaaaagtgggacgactggaagagcgattggttctacacccctctcgccgacgaagcgcgcctccgacttccgagccagcccccgtcgcaggcctccagctggcgggcggcggtagatctgggagacggctacgacgccgttcttgaccgcctggcgggtctgcgatcccaggggctcacgggggccatggtgttcggcgactaccttcgtcgccggatcgcgccgctccagcggcgcacccggggcgcctgggagtacaccgggcccgaggactacgtgaggacccatcaggggcgcaaatgggactgggaccctgaggacttcaggatggtggtccaacgggtgctgaatctcagctccgtggaggcatccctcatcccccaaggggtcctccccctttgctgcgatccagagcgcgccagcatcctggccaccatgcaggtggtcggggcgtcgggggagcgggccccccgaggccacgatggcgcgggcgggagccgcaggggggaacaatctaccccgggagggggtcgtgcttctgggccccgcgacgggggcccggggggcagccgccctgccgacgcccgggggaagaggaagcaggagggtacccctcccccatctcctccccgagggggcggggtggtgcgtgccagcagtaggcgcccggagggtgccgtgccgacgccgcagcccgagggggagcgaaagaagaaacggccccgcaagatggggggaccgagccatgccgggggaacctcatctcgcccccgaggtggtcgtttagccgacctccccgcaggttcgtccccgcgcccaccgcggccgtattcattctcccatctcccaaggcgagttttcactcacccgtttctttttgtcttctggtttttcttctgcctcagcgagatcccgtcgcgccccccccgccattccaagtccggccggtctgaggccgaggagacggcgaccgcggaggcccggaggcgggaagctgaccggcgagaagccgcagaccgcctccgggaagccgaggaggctgcccaggaggccgtccgggttcgccaggctgaggaggccgctcgggaggaggctagactccgccgggccggggagtccgtccgggaggcagaggcggcgcgcgcacgccaggcggcctgccaagcccccgacccgactccgcccgaggcgacgacgacttccgaggccacccacgacgaggccgcgggcgcgctgctcgggcccgacccctcgggcgacgcttgggacgagccagcttcgggggacgcccccgagtccggcacgtcgatcggcgggccgagccgcgcggcacccacaccgaggcggctctcccctatgccttccgctgccccactgagcgcggagcccctcctgcaggccttggccgccgcgaacaggacggtgctggacgggttaagtgcccagatggaggccctgcaggcggagcgggcggagctcgacgcggcgtgggcgcgcgtcgaggaggggcggcgctcggtggaggccatggtggaggcgggccgcaaggcacaccgccggcacgcctcacagctcgaggcccgtcgtagggacctggcggagatcgccagggaggtggaggaggagcgggagactgccctcatcgccaccgccgttctcgacgaggcacgggatgacctccgcctccaatacggaagccgggcggcggagctagaggagaagctcgacgctgcccggggtgtccttgacgccgccgctgcccgtgaacggcgggcggcggagaacgaggcggcgtcccggcagcgcgaagaggcccttgaggctcgcgccacggcgctggaggagcgcgcccgcgccctggacgcgaaggagagagacctggcggaccgcgaggccgccgtcgccacccgggaggcaacactggcggcgcacgaggccgcctgcgccaaagaagggtccgcactccgcctccgcgaggacgcgctcaccgagcgggggcgagctcttgaggaggccgaggccgcggcgcagcggctggcggacagcttgttcctccgcgaggcagcgcgggaggagcaggcgcgccgcaatctggaaggcgcccgcgccgagagggccttactggatgagcgggccgctgaactcgaggcgcgggcgaaggagctggacgcgagagtgcacagcggcggggcggccgcgggccacggcgacctagccgcccgcctcgctgccgccgaacacaccatcgccgagatgcagggcgtgctggactcgtccgccggggaggtcgaggccctccgcttggcgagcgaggtagggcccggcatgcttcgggacgccgtctcccgtctagaccgcgccgggcggcaggcgggcctctggggcgggcggtacgcgaagtacgccgccaaccaggggggcctcgcccagcgcctctcagagatggccggggccctcaagcggctccccgaggagctcgaggagacgatcaagtcatcctcgagggacctcacccgggggggcggtggagctcgtactggcaagctaccaggccagggaccctgacttctccccgtgggcagcgctggaagagttccctcccggaaccgaggacggcgcgcgcgcgcaggtctgggacgccgccaaccacatcgtccacagcttcgagggtacggcccctcggctcgcgttcgcgctcgactccgacgaggagggcggtgacgatgctgcggacgacagcgacgacgaggccggcgacccgggcgcgtcggagtgagcccccaagcccccgccaatcttaataacttttccttcttcttctgaggccttcgggcccccttcttgtatagactgatttaatctgcaatcaagtaaagaggaaatttctgcgtcagttctgtttgttgtgtgtatgagacgaggatggtctgtgccgcggtccttctgtgtcttggcttgaacaagggctcttgcccaggtcccagcctcaaacggcgcgggtcggggctagtgcctggggagatcctcgtgtcgagactggccaggccgggagcgcggtgaccgagggttatggatgacccgattgtgggcctttgccgattcccccccggagttcaccacgccccggggcacggctcggttctgggcccgtttggcgattttagccggcccgggccaccgagggcagggtcgagcacgagcgtgctaattcaagccaagattcttcaaaaggaaacgatggcacagacacagtcctcaggaaatcgaaaatgcttttattgaaatacggaagagaaaaaagataagtatatgcatgtggtagcccccggccaaccctgcacgccccgggggggggggggtgcggggttggcccgagcccgagacatgacacccgacccccactaggggtagaagcgacgaaggtgttcgatgttccacgggttaggcagctctgtgccgtcgcccgtggccagccgaacggagcccggccgggggacgccgatcactcgatacggaccctcccacattggtgagagcttgctcagtccagcacgtgtttggacgcagtgtaggacgaggtcgtcgacgcagagtgatcgggcccggacgtagcgctgatggtagcgccgcaggctctgctggtagcgtgcggctcggagggccgcgcgccgccttcgctcttccaaatagtcgaggtcgtctcggcgaagctgatcttgatcagcctcgcaatacatggtgacccgaggggacctcagggtgagctcagatgggaggaccgcctccgcaccgtagacgaggaagaaaggcgtttccccggttgctcggcttggcgtggttcggttcgcccagagcaccgctggcagctcctcgatccacgagtcgccgtgcttcttgaggatgttgaaggtcttggttttgaggcccttgaggatttccgcgttggcgcgctccacttggccattgcttctggggtgggcgggggaggcgaagcagagcttgatgcccatgtcttcgcagtagtcaccgaagagctcactagtgaactgggtgccgttatccgtaatgatacggttaggcaccccaaaccgagcagtgatgcccctgatgaatttaagcgcggagtgcttatcgatcttgatgaccggataagcctcgggccacttagtgaacttgtcgacagcgacatacagatactcgaacccgcccggggcccgcctgaacggacccaggatatcgagcccccagacagcaaacggcgacgaaagaggtatggtctgcagggcctgggccggctgatgggtttgcctggcgtggaactggcacgccctgcaccgccggaccaggtcgaccgcatcgttgagagccgtcggccaatagaaaccctggcgaaaggccttgccaaccaaggtgcgtgaggcggagtgggctccgcactcgccttcatggacatcggcgagaagctcgacgccttgttcccgaggaatgcacttcaggaggactccgttagccgcgcgccgatagagggtcccttccaccagcacgtagcgcttggagatgcgctggacgcgttcactcccttcgcggtcctcgggtagagtcttatctgcaaggtacgcctggatctcagtgatccaagcaatcaatctaggggagctgggagcgctcccctcgggtcctgaggcctggactccgacgggcctcgggggccgttcaggcgcgtccgtctcccctagggggtcgggtcgcgccgacggctgggcaagcctttcttcaaaggcgcccggtggggtccgggctcgcgaggaagcgagccttgagagttcgtcggcgaccgtgttatcccgtctgggcacgtgccgaagctctatcccgtcgaaatggcgctccatacgccgcacctggcgcacgtaagcgtccatctgcgggtcagagcactggtactccttacagacctggttaacgaccaactgggagtcgcctaacaccaggaggcggcggatccctagtccagctgccactctgagtcccgcaaggagtccctcgtactccgccatattgttggtcgcccgaaagtcgaggcggaccaggtacctgaggacgtctccgctcggcgaggtcaacgtgacccccgcaccggcgccctgaagagacagggagccgtcgaactgcatcagccagtaggcggtgtgaggcagctgcgaggggcccgagctggcctcgggggcggagacgggctcgggagctggggtccacttcgccacaaagtcggcgagggcctggctcttgatcgcgtggtgtggttcaaagagcaaatcgaattcagagagttcgattgcccatctcgccacccgtccagtaccctctcggttatgcaagatttggccgagggggtaagacgtaaccaccgtgacccgatgcgcttggaaataatggcgcaacttcctcgaagccatcagaatagcgtaaagcatcttctgggcctgagggtatcgggtcttggcgtcccggagggcctcgctaacgaagtagacgggcccgctgcacctttcggcggggccgatcgtcttcgccaggggccgcatctccagggcgctcttcgtccgacaggccgcgcggggcgcactcggcttctgtgccgaagaccttggggtcagagggcgacaggcgcggccttcccgcagtggccccggggccatcctgggggtcgggggcgcctggcaccgtcggacaagcaggcggagggccagctccggccgtcgggggccttgggccgccgttcggctcgggggcctctcctccctgctgtctcccgggtcgagtcgacacagggtggggatgcgcggagtgagggttgtcctcgtcgtgctccacgaccaacaccgcgttgaccacctgcggggttgccgccaggtagagtagcaacggctcatctggctccggggcgaccaggactgggggagaactgaggtacgccttcaactgagtgaaggcccgctcagcctcctccgtccaggtaaacggcccggagcgtttgaggagcttaaataggggtagtgccttctctcccagcctcgatatgaaccgacttagggcggccatgcagccggtgacgcactgcacatccctaagcttgctggggggggcgcatccgctctatagctcgtatcttctcggggttggcctcgatgcctcgggcagagaccaagaacccgagaagcttgcccgcaggcacgccgaacacgcacttatcggggttcagctttatgcgggcggagcggagactttcgaaagtttccgctagatccgagagtaaggtctcttggttgcgcgtcttcacaaccaagtcatcaacataggcctcaagattgcgtcctatctggctacccaaagaaattcgagtagtacgttgaaaagtaggacctgcattctttaacccgaaaggcattgtcgtataacaataagttcctatgggggtaatgaatgcagttttttcctcatcctccctagccatgcgaatctgatgataaccagagtatgcatctagaaaacacaaaaggtcgcaccccgcggtggagtcgacaatctaatctatgcgtggcagggggtaagggtccttaggacatgccttgttaaggtcggtgtagtcgatgcacatccgaagcttgccattcgccttgggaacgacgaccgggttcgctagccactccggatggatgacctcacggatgaatccggcctccagaagtcgcgccacctcctcgcggatgaaggcttgacgttccggggcctgccgccgcactttctgccggaccgtccttgcgcccggccgcacggcgagacggtgctcaatcacctccctggggaccccgggcatgtccgccggtctctaggcgaagacgtcggcgtttgcccgcaggaaggagacgagcgcgtcttcctatttgtcgtccagaagaccaccgattcgtgtggtcttggacgggccgtcgcctagggcaacctccttgaccgggacctcgtcgcacgtgacctccgctgccttggggcggccgggacggaggtgctgagcctctcgtcgccacccgcgggcttggacgccgcggcgaggtggtccgcgcgctgctccatacaagcaagcgcgactttgaggtcgccatggacggtgatggggccaccggggcccggcatcttcatctggagataggcgtagtggaccgccgccatgaacttcaccaacgcgggcctccctaggaccgtgttttagggcagactgaggtccgccacatcgaagtccacccgctccgtgcggaagttggcggaaccaccgaaggtgaccgggaggtcgatatgacccagcggccaggtgtgccccggcgtcacaccgatgatcggctgggacggccggagcaccatccccggggccttgatggcgtcaaaggctgcgggggaaaggatgttgagggctgcacccccgtctatgaggacacgccccaacttcacattgcaaacggtgggggaaaccaccatcgcgatctgtcctccccgggcaacgcacggcgggtggtcggtctggtcgaaggtgagggcaacctccgaccaccgcgcccgccgcgtcgcctcatgggtaggggccgcggccagaagctctcgcttcatggccttgaggctccggcgagaagcgtgagcgcacgctcccccatcgacggtggcgacggtggcctcaggctcctggaaccccaggtcatcgtcgccatcttcgatgtcctcggcggtggccttctgcttggcctcacttcgccggttgccggcgggagccgccggggccttgccctcacggcgctcctgcctcttctcctcctcccacttcctcgtccgctcagccaaacttttgaccgcgcggcagtccgcgaggtcgtggagggaggtgttgtgcacggtacaccacttgccggtcgggcgctccctgctgggagcgccggcctccttctttttgtcgctcgcaggcctcccctttcggggggcccgcgaagcgccctcgacggcgaggacatgaccctcgtcgttggaacgggccgacctcttcttcctcctcctgtcccgccgccctgaccgtgcggcggacccgggggcggccagagctgccacaccagaaccggaggagttccaggtccaggcctcctccttgcgaaccacacggtccgcgagctcaaaaagctgcgcggtggtctggggctccttggaggcgatcttctcgagcatgcggttgtgccgcacgccccccctgaacgcgtagatcaccgcgtgtgcggggatgcacggtatggtgttgcggacttgacagaaccgctgaatgtacgagcgaagagactcatcgtcccttcgctgtaccgcatgcaagtccgcttcttcgcctgggcgcggatatatgccctggaagttcgtggtgaactgctggcacaaatcctcccaagagtggaccgacgcgggtggcaagttcattagccaaccccgcgcctgacccttcagggccatggggaagaaattcgccatgaccctgtcgtcacccccggcagcctcgatcccggtcgtgtagatctggagaaactcggcggggttgacgcttccgtcgtatttttcggtgatggtgggccggaaccttgggggccaacggacgttccgaaggctctccacaaaggctcgacagccggcaccgccaaccggggacacggggggccggcccccgtgtccggaccgaagtggcgctccggacgaggaagcgccctccgttgcgtgggcggcgcgacgagcgtcgcgccggtgctcgatatcgaggcgggcatccggccccccacgcacatcttcttgggtcggaggcgttgacgagggaatggcggacgaacggcgggtaacggccgccgctcgccgcgccctcctcctcgacgacatggagccggcggcggcagcgccagaggcctcggtggcggaggaccgcccgccggcgcctaccgccggcgcctaggcgctgctgcgccgtcatgaccaagtcggccacgtcatccagccaacgtcgggctggagtctctggatcggggacgacgggcgggtgacgcaggagcgcgcccgcagcctggagcgcgccctggggcgtgccgccatcgcggtagacgaggcggcgacgcgccccgtctcgccgtcctcccccgtcgcccgcgggcggcgaagtcgcggatccttcgacctccccgagcgcctccccccgcccaagatttcggcgagagggggacggtggggtgcgagcccgacggcgcgggttccgctccccgtcgtcaccgctagcgctcggagagaggctgtgcgccactgcccgttcggccattgggctgagcgggagaagcttggcgcacacgaaagaggacgagggcttagaaagacacgcgcgcccctacctggcgcgccagatgacggagcgtggggctcctcaccgggagaccgcgcaggcccccctttgccggttcggccgggggcgctaagtgaggttcttcgccctcgatctgaggaacgtcagcgagagaggaagtgcacaagacacgggcgacgtagacaggttcgggccgctgagaagcgtaacaccctactcctgtgttctggtggatctgtgtgtgaaggaatacagagagccggagagcgagagagagttcaggctctagcacccattcgccagagtcccaactcctcttcctctttttttcctctttctccccctttttccttcctcctaggcctgggcctcctttttatctggtcaggggtcaccacatgggcctccagctgcctaagaaaggaaacatgctttttacaatgagggctagtctacagccggaagtgacctctgacaagcagagcccacgcctcctgccccgctcgccagcttttccggtggacgcccatttcaaccttcattcaatggccagcgacttccttgccatgcttgcgctgaagcttggaatggatttgaccgggactgacataccaactccaggagttagcacgccggctccggctagggacgagagccaggaagctctcatcattccgacgggacggggcgaggcgtgtgacaggccgcctgttgccacctaacccgcgatctgaccggtctgtgaccggtcacacaccgcgaccggtcacggaccggctaagcgtgcgctgcgccgcattaaatgtggcgtggcgcgctcgtccaacccgctataaatgcggttaggtgagccccgctgtgctcacctaacccacacacgtggcgccaaaaccacagggggtcggggcgccccagccctcggggccgaaacgggggcgccccagccctcggggagacagagggaggggtggccacgtcaccctcgggcccgacccccccccctgagggggtcaggctacgtgggtgaccgcggctacctaagcctctagtcatgatacccccggccccatgtcaccgacaataggttttaacaatactaaaacatatagttttgtgataatgaagacactaaacctatagttttgtgataaatgaagatattaaatatgtagttctgtgaaacaagttcttaaatatgtagttatgtgatatattatgcaaaatacatgtagttttgtgataaacaaagacactaaatctgtagttttgtgaaacaagttcttaaatatgcagttttgtgatagatcatgcaaagtatatgtagttttataaaatttactctatatttaactattcattaatttaaaaatatactgccttctttttttaaataaatgtcactgttaacttttagtcacacatttgatcattcgtcttattcaaaaaatttatgtaattacataatttatgttgttgtgacttgttttatcactcaaagtactttaagtatgatttatattttatacatttacataaaatttttaaaaatataaatggtaaaaaatgtgattaaaagtgaacggcgttatctattaaaaacaaatggagtatataattattatttattttcttgtgacttagtttatcactaaagatatttacacataataatttctaaacatgataaatgaaaatagaatgcagagtctgcaatacgggagagagctccaatgccaacagtaatagcctagcaacggtgacagatttgtctagcctccgacatattgtagcacacgctactgtagcgatgtaatctgaaccgttagattgtgatcgtgtggttggaagtttctcagaatgcacacaacggaacgaagcagtcacgctcgtgcgatgaagatcggacgacgcagctgcgctcgagccacgtcaaaggatctagctagtactacgagccatgcgtaaaaaaaaaagaaggaaaaaataaggcgtgcgactagagacacacgaaacgcgagtacgccgacgccgcgacgcgtcctttcgtttcgctcccctcctccccccgatctccgccgccgccgccgccgccgccttccgatctccgcctccctcccctccggatccccgcgctcgccgtcgacgcgctccctctcctccgcccctgcgtctcggcccacggtgaggtgccctccctcctctccgcaaggtctctgtgcggatcctcctcttcttccctcccgccctcgtacgccgcgcgctagggttagtcaggattcggtttggggggagagtttgcgtggttagcgtagcaaaactagcaataggagatttacgcagtgacgcctcttaatcctcgcgtttctgtgggatgttttgctgttgggataaacgagcaatcgagatttgttcatatttcgtcaaataaattattattactttttgaatctgctcgtgatgtgcgttgcgcttgggttattcggagatgaatcatcctgcttgtgtaaacagctgatagcattttggggaattaaggtctgccttgcaatgctcataaaaaaatactaatcatgttggtttttcagtatttttctaactctggctagcatatcaactcctgctactttatttgctgcacaacatattagttccttataatgtgcttctctgtttgatgcgtctgttgcgtggcaccgtagctgcacatgtgaaagacacgccgtttatatttttcatctacttgatctgtaccccatctgatcttagcttctctattcctatcaaataggttacctgaggtgaatacattggagttggctgggatacttctgatttgaggagattataaattggaacaatgcctccccataagatagagacaggccaccaggatgttgtgcatgacattgccatggattactatgggaagcgcatcgctacagcctcttctgataacacaataaagatcattggtgtaagtggcaactctcaccagcagcttgctactctgagtggacatcagggccctgtctggcaagttgcatgggctcatcctaagtatggttccttgctggcatcctgcagctatgatgggagggttatcatatggaaggaagggagcaagcctgatgaatgggcgcaggcgcacactttcattgagcacaagtcctctgtcaattccattgcttgggcacctcatgagcttgggctgtgcttggcttgtggctcatctgatggcaacatttcagtcttcactgctcgttctgatggtgggtgggacacaacacgcatcgatcaggctcacccagtgggtgtcacctctgtttcttgggctcctgcaatggcgccgggtgctctaatcaatacagggccttccggtcagtttgaatatgttcagaaacttgcctctggtggttgtgacaatacagtcaaggtatggaaactgtacaacgggagttggaggatggattgctttccggctcttcagatgcacagggactgggtgagagatgttgcctgggctccaaatctaggcctcccaaagtcaacaattgcaagtgcctcccaggatggaacggttgtaatctggacagcaccgaaagaaggcgagcagtgggaaggcagggttctctatgatttccagacacctgtgtggaggttatcctggtcattgactgggaatattctggcagtgtctgatggtaatgataatgtgaccctatggaaagaagccgtcgatggcgaatggcagcaagtgaccactgttgaggcttaggtgttttgagttgttcttcccctggctgccaattataacatatgtgtagccttcaggctggccaatggctctctgcttacaatgtggctctagtaattttgcttctgctcagcaattagcaaggcgcaagtaatttgcttggatagagtagaaaaccctttgtgtcgcaactctttcatgtattatgtgttcccttgtgtgccttctgtttaccattatttatggcacttctgagtgcagatttttcgctatcctgcgactgtttaatgctgcccgtaagcgattatgatatgtcatcattcttagcaacgaaagcaagaatctttagatcttgattgagaagtttggtagccgaagtttttaatccctgtcagtgtggtctggtaggtgttcatccattgcagcttcgtgcacggaacatgaaattaaacgatgcatataagagtgggaaaaagcttgtttggaatcttccgttatcaatttcttactttgcttctacgtgagtctaaaacaactttattttggataggacggactattttttttttcaaaagaagtcgatgtatccggatagtgtaatcaagtcgtaaaattttacgaatacaaacatgtgtttatcctctgtttgactcatatttgacctgtttattattccattcgttcaaaaatatttggcgttggttcatcgcaaaaaagaaagaaatggagggagtagcttttgtaatttcttttctcatcatcattgtaataagagcaaaataggtttttactatttaaattcggccaaaaagcggcctatttcccagaaaaagctgtccatcaatagcagaagcccccaaaaaacttgaaagtgtaactaacacgttgtgggaccaagagacgatcccgaccgtccatccggggaaccgcgccgatctccagccgtcgatcgggctccacgaccgtttccctcctcgccgcccgggcccccccccccccctcctccttccgttccccgtttcctccctttcccctctcctcctcatcctccccgacgacgaggcaagcgcgagcgcgaggcgagccgcggcgacctagggtttcgtcgcgccttcctcctcccctcccccgccgcggccgtcgccggagacgacaaggtatgcccgcacgcgcgcctctctctctctctctccccttcgtcccacttgcgagcgatcccccacgcgagccgcctcctgtggttgtggtgtgggttgttgttgtttgatcctgggtgtatcctgctacgttgcagtgttgggtggttgcgggtggagttcgatgctctggatttcgcgcgaatcctagtattttagagttgttgttggttggtgatgctgtggaggggggattggggtctcctccatgcttcgtgattgctggttctagatgtttcctgttgttttttcgtgcgtaacgcatcctttgcttagtgccttggttgatcgagttgcagtgtgcctcgggctgccttgtaggccagacattgctataatttctcagcctgtctgttgagaaatctgaaatgaaggtgtgtaatatgtaggggtgtcaccaggaaggaagtgaaatcctcgttttgttcaagttgcattatatatctaggaaccttatggtagctttgtgctggagtgcgggtgtggaatacatttgtgcacttttttgcactggagtgcggatgtgaaatacatttttgcacttgttccttgcaagttgcaactatgtgtgattaggctattggttgaagttgggtgacagatttggagctcgaggcaataggatgttaaaaactattttattatggttgcagttacaatttgctgtcgttctatgcctaccctgtttttcattactattcatgtccctaattgttgaccatttttatgtaagattgcactgttaagaaaaaaaaatgtatatggactgtggtgtcatctttactaagtactaatagtactgaactgttgcctacagcttttttaaactgtacatagctaaaatgttttatgttcccaattccaaggtttagttttctggatggcaagttatttttgattgaagtatgagatcagtttttggttgttggaatactttatctaggacctgatcactttggacatagtattgtggaaaacttttatatggtgatctgcaacttttgtgcgttaacttatacggaaaccaaactactatgtgacagaagaagcagacagagagatatctcagctagttatttcttattagatagtagtaatactttttttttgcactgcctcttcggttgagtaatcctcatagtaggcatgctgtgtggaataagttaatttctcagcaaagtttggcagacatgaaaatgcagtttatgatctgatgaatcttcactatttgtacacattttaccaagagttccttgcacatgtaacaggtctgctggagtgccaataatggagcggtcttctcggttgaatccaaacgccactccctttgtgcctccccccaggccttcatttgaagaaagcttgagcaaaagaaaggcctctgagaagcaagtaggtgatactgaaaaggatgagaatgctgacaagtctgctgaatatgagctcccagattccctttctttggatgactatgctgaaagcctaggaaagctcaacatttctgcagaatcttcatcaaaaggagaagctacaaacagtgcgtttgatccatcacagtatgagcaaaatggtgttgataatcatcttgctgtggtagaatctctctcaaagatgttcccagatgtgtctgccgacttcattgttgaagcactgaaggcccatgaatttgatacagaactcacaatcgatatgcttgctgatctggtatgtgaaattactacttctattctctgcctacgatatttcaagctattattgttgtttgcacaccttaccttgaaactgcatgctaactaacatttttgttgttgaaatcatctctgacaatctctctcgttgaattttctacttcagtgtgaaggtgatgattatgggcatcctgctgaagtgtcagcgaagtagcagcagcaacggcgtcgctcttcatctaccttggcagaacaattacccttcagctacatgttattgaagtcattcttcttgacaatcaagactgaatttggtggtgtacaacttattgctgctgtaaagaactcagccttgtttaggagccaaagcaacaaagaccgtgttttgggtttttagttcctggtggaacagctattctcagtactttgagtctgcatcatgttgatgatttcacccagcagtttatcgcgtgatctgttgcaacccttttggtgtagctgtacctctcctagctaagtgttcaggagccagcaatcgcgtgcagttttgctgcaaggctgtgctcctaccatgtacattctggtcttgctgcattctgtgtagggagatgaaccattcctcttattctgttatgatgcattgtttgaacagatatctcgttccagttattgaatggagatttggaggctatgatagtcttggttatgacttaatgaagcctcactataaataatcttatatatatattttttacttactagttactaccttcatcccatgattttgtctcggcacactaaccggtatctctagctatttcttcaagccgtagtggtcaaaattgcatttcaagaccgtgcagatatcaaaaacatttctctcatgacttggattgaatggtattagtatttgggaccacttttagaaggcaccatcctaatggcaatgctaatcccacacgtccagagcattatgtgtgtgcttgcttaaggtgttctcttgaggaaatgttcacatctcccttttgtaatttctccaagaaaaatacaaaaaaaaaacggctttcatttgtgtgttctgttggaaaacaacaaaaaaaaggcacacacccattgcatttccttgtgtcactggggaatcctcacgaataagaaatcattttttcccctcttctccaaactggcacccgctcgaccgtcggatgaagcgtcccaaccacactccaccgtccgatccacccctcgtgttccggggggggggggggggggggtttaaccgcacaaagccagaagaaaaaagggaaaacctgtggccgcgagcgcaagagcacaagagtgcacgaagacgagacgagagcgagctgttcatcctcccactccacctcggagctgagctctgcttctctcccgatctctccacccaccgcagcagcatcctttcgacctctctagggttccagcctcgagttggcctcgtccccccccccccccccccacattcgctgcgaggttgctgctcgcttcacttgtcttcggtttgatttccccccacctaactgattctgattgatacggctcggctcgtgtgtgcggctcacttaggtttgggattctcttccggattggattggtggagtggcagggaattgttagttctggtgtggtttgtggttaagagaaggggtgaggttcttgctgccgtgtatctgtactgattccttttgcatagttgtttttttttcttttcgtgtatactgttatctgctactgtatgagagacttatgttttggctaatgttctcgattggaagctatgaaaatgtaattttgatctatcttatttcctatttttgttcagggaaatagctatggagtgtctgaccacaagttttactaggtaagttattctcttgattgtgcaatattattattcagatatagaatactccaacatgaacagcatgtatgtatgatctattgatattgtccgtaatctgattttagcttggtaagttagttaatccccgtacgactttcagaattccccatgccctgttgaaaccacatccagaatgcatagttcttcttttaccccccttttatcattactttaacatggttaggtgatgtttttggtgaaggaatccgggaagggagtataatctcatatgtccgagcgaagctctgtctgaaaaacaaaggattcaaagaagggttctatgctattttccagcttccacaaactcaagacgatgtcgcaagttcacaactatggcatatcctgttagcccaatagctggcagacgttcaaattggagatcttttgctgcaagtctgaatttggaagatggtcctgcatcctctgactcaacatcatccccttcagagcaaactagtgatggtggtgaagtttatggtgacccttctgaaaatctgaattctcggaaacttaaatctgacgaggtatcatatcatccaattgtgtattgtttcacccatgcagttttttttctttgccaggacggcggaaggacacgccgtccgaaattcattagattttaaaaggagtacagtacaaatagcttggcaaacccgtgcagcttatcactctgcattcctgtaccatatgtcactcaaagattagcagagccagcatttcaattcctccaatgagttcactataaatgatctctactttcaaggcatacctcacgttattatactttcctgcataaatctttcagtccatttttaggagttattgtttgtatttgtcaaatattaggtcaacagggggtttttaatgtagcatctgcgtaagagaaatatgtatctgtatgatatctatgtggtcttattccctagcagctaagacagcttaaggagatattctccttaacccttataatcataagtattagagagtgacctccttcagaaatgaactcaacagagaaatggcaaacttgattgtagctctaacagttgatgtttcggttcgtagatcgcacttgaaagattgatacttccaaagtacaaagaacaacgttgcaacttggtcttttttttttcttttcgattagcaacctacagacactagcattattttatatatgactaatgttgtgcttctctttttattttggcatgcagttgaaatctcttttggctgattcagaacgatctaagcttttgaaaaagcttagtgaagcaaaccaatacaaccggttcctcaagagacaggttctattattgtacctttttccaaagtgttcattgaattgcatcatatatactgttcacaattatcagcaaataacataatacagaattgttcatactgaatagctttctattatctgcgacttgaactttatgctttctactgaagatagcgcctagacgttttgtaaaatgaaaaacaattactctgtccaggcactgtatttgctgtcatgatgcaagtcagcaagaactagcaattttgttcagtcaggatcgaatagaatatagaactccccttttacttgtagattactgttgttgattcactttatgctacgcactatatcgccagaaaaattacattttttttataaaaaatctataatgcattttgtagtacaaatgtatttaaatattcctaacgaatccaggactttgaactactgaaagtatcttaggatatttttctttaaaaaatcattcatgaactagtttgctaaattgaagcttcttttgcatcagatgaatatttttgtgagattacattttttttgtataaatagctgtccatacagagttgtggttatgtcaaatatgcacaattccatttctcttattaagcactgaatcattgctaactagatagaaatgtactatttcttgcagttgcaaatgaaggataatgacgttgtgaagttcaagagtgaacttgccgttatggaacttgaactgcaggttagctctaacagacttttcttgtttcatagttcaatcataagccctttggggacaggggatgctatcaacatgcctttaactcatctagcatcttgagaattcattcataacttcatgtttccttttccataaagatatcagactgtaaatacatgaatgaagtatgtctggcttcctctaaaggattgtatgattttgtatgcctctgtactttgtctcccctaggactggctttaaatcaatatattttgtttcttggttttgttcaaacttttatcagtgatcagtattgttgatactgttactctaaatgtatttacattttgtatgtattcactgtttctttatgtccacaggctctggttgccctagctgaagagattgctaattttgatgttccatctgggtctaggaagataaatggaaaatatatccagtcacatcttctcaccagattagaaggttatctctatcacaatgctccaagttgaattaacaatgaaattttctgacgaaatgtttgtttcctatagctgttcatgataaggttatggaacaaattaaggatgtagactctttaaagcaccaagaaatttctgtcttctgggttggcattgctgaggtaaaacaaggtttttgacttaactcgttatatggaacagaactattgtcatatatctacagctatcatttatgtcctctattgttcttcattggttttttgtctgcacatcagaatgtacaaattatgggctccttcgatggctggtcccagggagaggcaatgtccatggagtattcaggttaccaagcaagattctctgcaactctgaatcttagacctgggaggtgtgttttgtgaattctgcagagcgatctgatttgctatgatttatttattaactaaacaatctcacttatctgtttgtatgcaaaataaaggtatgagatcaaattcttggttgatggagagtggaggctgtcactggagtacccaattgatggcgaaggttcaatgcagaacaatatacttgttgtaaattaatgtagatatctgttggctcctagtttgccatagttgtaacttgcagctataaaacctagcgcaagattgaactgtactcgattgctatcatgcatccgatttgcaaaatttcactttaccatgaaatgcaaggcctttttttcctggttggatgtacatttagctcagttactttcacattctaaattgatatactgaagtccagggactacattgatagacaggcactcccactgggttgcacaccatcaggctcagaaaaggatccttgggctgtggaaattctgccaaagtaccaattatgaaatattcctacagaatgtataattgaattggatctttcatgctgctgcaagagtataccattttctgattcgtcgccgcttgaaaatcgaggcagccttgtaagtcagtgccactgcacatcagcacattttcgctcttcagtattgtctatattttcactgagcatatagaaaagcaagttccataatgatatcaaacatgcatcaaattctgtacttatttgctaatgtagctgtcatcctagcaaaaagatctgaagcaatttgtgcctttctctttccggttattattcaagatgaaacaatgttcatggtatattgacactctctaaggcatgttcctttttacagtgatttttgacaggtctgaactttcttgtatgtgtatcagtagtaaaaacttgagaaatctgtttgatgttcctgctactggtttcacactttcagctacattttttacaactaatctgagctagcgcaggaactcccgatgttatcagctacctcctggaccatcagcctgacgaccaccggagccgccgctccggagcctgacctcgccgtcaccgacatcgacggcaatgccgggacgacgtcgaggcactcctggaagtcggcgtcgcaggacagaagcacccactcgtggtcgtcgtccaggtacttgacgtcgaaggcgccggcgtccaggctcagccgcttggccaccaccgccttcaccgccgcgacgccggctgagcacggcaccctgaacctgatgatgtcacctctgtggctggccttgatggtgaccacgccgtcgccattgccgcacctcggaggttttcgcaatgcagttttggcgtgagatggcggcgcctggcatgatccatgggaggaggtctctcctacggtacttgacaggcatggccgcggtggcggcggcggcggagggagaagaagagctgggtgagcaggcatggccaccggcggcgacggcgagcagttcacggattccatgacgcgcttcatcttgtcgagggagcggttcaccttgctgatcttgcgaaatggccaccttgggatgccatgctgcctgcagatgcgtttcattgttgttgggcatactgcaaaacaagaggataaaactgtcacctggtgatccaactttcagtggttgcgtgttaatttgcgcataaacatcaggattttgatgaagataatccactgaatatccagctgattcatttaactcatcaattatcatgatgattatatgcaggttgttggcaagtgtgatgttgtcttaccaccgaggcttcttgcagcatccttcaagctaccagagaagtgtttctgcagctcctccaaagtgacagatttctcagcttttcctcttttcgtcttgttcttgccaacttgtgatgtaggatcctcatttctgatttgatctgcattgtgaatgttaagctcaccaatgtttgtgttctccagcagctgcagatcctcctcgtccgagcatctttgatcatctccaagatcatccatttcatgccttagttggtgatcaccatctgccatagtatccaagaacaaatcatccaagttgctgatcacaatggctttcaggttgccggagcattgcttgatcgtggcggagacggcgtccaccgccgccttctgctccgcgacgccggtgcagtccggcgggaggaagagctccagcacgacgcagtcctcttcgtcgccggcggtggcggcggcggcgtccgccatggccgccgcgctgagctcagcgcgtagcacgaggcatccggcgaggccgtacatgccagcgtagtgcgcgagagggtagtcgtccttggagcaccgcgcgacgtcggcgcagaggcggccgccgcccggcgcgcgcgccgcggtgccgacgagcccctggccacgctgcaggtggtgctcgacgcaggcgtcgcggaagccccgcgcgtccgcgccggcggcgaggtggaacggcgcgccggcggtcgtcagcgcggccttctccgtgtcctcgccgccgccgccgcagctccagcatctcacccatgtctgtgccaatggcagcttgtgagcttcgcacaccgtgatcaggagctccgatacctcggccatggccgcccgggtcgcatctcgatggactatctggttcacggcaagcgagtaacactggatcagtagatgaacggatcatgcaatttctcgtgaaatttcatgtgatctcaactctcacctcggctgcacggttgcaaatccctgcacctctcagtgacactgcctgcatatgaacacaagaaatgttaatcacttcactaatctaatcactcctgctaatcatttcttgatcgagacagagagattacccgaagagcgttgcagaggttggcgacctcgccggagacgcggagcagcggggcggtggtgacgagctcgagcacggcgaggggggagctcgcgtcgtcggggtcaaggatggggagggcgaggctgccctggatgtcgtagatgagcgcgtagctaatgcgggcgtactcgccgctgccgtagcactgcacgttgggcgtccactccggcgccgtcgcgtcgaacgccctggcaggaagcccctgctcgtcggcggcggcggcgccgccgacggggaagacgcgcgtgagggagacggtcctgtactggaacaggcggtggcactgcgacgccaggacgaacggctgcccccgcgtggcgagcacgcgccgggcgccgtccctcgccggcgcccacacctggaccatccacccgccgccgccgtcgcccgccgcctccttgtacagccgcagcgcccgcgcgatccgctgcttcaccgcgacggccgccgcctcctccgtccccggcgatccccctccccctccctcgctcccacctgcgcacgcacgcatacaaacaaacaccttcatctcatggaccatctcgacgcgttcttgcagatcaagaagctcaaatcaagcgcatcggcgtggcgcctacacggacgttcaccggcggcgccgccgcgttggaggaggaggttgaagtcgccaacaacgcgctccatgtcggcctccacctcaaccaccaagaccgatccaccacgcagaccaaccaaacaaagaagaagacgatgcgaatatgcgacccgaatcgatggcagctaccgctccatctccatctccatctgcatggcgcgaccaatgtcgagccgcagcttcccaaatctcgcttctctggtcaacgtctgtagccaccttgtttaatcgcggcccgggggggggggggggagtggaatattatgtcctgggttaggatgtgcgggaggagattagatctgggaggggttaattaatcggagggggagtgattacacaaaattatcatcgtgtcccactgccgctttggacttgccattgccatcttggatatgggagaagaaaacataaacaatgttactactagtgtagtagtagtaggcgactcgtagtaatcctctttgattgattttaaagaaaaacaacaatcgtgaaaaacggaccgaaaagagccgaaaatgggaaacggaactatcaacgaaaatgtgtaaaatttaagtaagaagaaacaacgagctataacaatattatgcttcacacgctaaatacatgtatatatataactttatagtttattccatccgtctaagcaaccttatttttagtttgtcttagacatatattagtacctgaaaaagcttccgtgcattgcaacggatattcggaagaaactaaatatttagctacttcaaaaattcaggatgttttgtcctaattgtccctccgtggccctttgtaagtcgcctctatatttgaaattcgttgcaaaccaatttcttcgacttccgctgacatggcagattgactatgactcgccgagtcaattggtgggacccatgtgtcaacgactttctcttcatttcatcttcctcctcacccctctcaatctctctttcctctcttcccacaagcgtgtcatggaggagatccgggattccaaatcgagtccgccgtcgtcaaccgctcaacgcttctcgacgccagcctccccggaggtccgaggaggcccacgggcaggagagcacagtaatggcgtgttgacgacgctaccaccatgagcgccatcgtacgaagcagcaacgtggaggtgtcatcggccgagttgccgatgaggaaggaggatgattgcaatggccgcatcaatggcaattggagcaacaactcttggaagaatgtcacaccctgccttggcatcacataatagtgacaccagagagggtacgacgcagaaaatccacatgaaccgaatcccacaaaacctcgctgctggtaccagtccaaagatacaattgcttgtacctgcaaccaacagagattcatcatagcaattaaacatactatagatagattgtacctttaagaggtcacaccttcggggtaactcctggagtgtaaccggcaagcagaaaagcaacaacgaaacctaacatagctagacccaatccacatgcaatggcctgggactaataaggaaactctattcttcaacttcacttcactcttcctgtagaggaaaaacaacgattgagtacatacgtacttagcaagtcacggaaatgtggggttgcaggatgcaaaggagggctaggattgttttgtaaacttttagaatacatttttcaaaacactaagtgtcggaaagaagcttttgcctcaatcctatctgcaaattgcttgcaacaactcaagcgggcaaaggaactttttagttgattaaaactattctaccagttgccctaccatgaaaccggtgcatgatcttctgccatcaagcaacttccaactcatttcccaaatattagtttcttttcactttcaaaccatcgggcatcaacgcatctcataacacatttctttggctccaagagccatacacacaacttccactcgagaaacgtaatctatgatgccattagacatcttgatctacacaatattgttttagaccacgtaacggtcacccatcaacccacctagctgaatttagtaacggttttcattcccacaaattatttttgcaaatcacatgcaaacaaatctacacaagaggaatcacttcgcatccgcccttgaccatgggcacggttgttcgaacagtttcataacctctgcaaatgggtacactttacccacacgacgtgagcttactccaatcgcccaacgcgtattgattagatacaatcggtgaagcaaggttcacgacaagacatttccaaagccaaccgaagatacctcatgccacatagaagggttctctctgaaccgagcatcaggcaagcctcagccctcgtctacccatgaattcggaatgtcttcaaccattcgtgcctagcatgttaatgttcaatgtgtgcccaacgcaataaactatctcacatctcctcatttgttgcgcccggaaaaattgccttttcccaaacgctagtgtattaatcctcgtcccaggaaaagccggggtacaccacacaaacatgatacaaaagacacatctttattatatcgataatatttacattattacaaaggcacttaaggcctaacaaacaaaaataaacagcagtggactagcgggcctacgactccatcttcacaggcgctcaactggggtataagccaggactccacctaaaacttcttctccaaagcctctcttacagacgggggaaagatagagcaagaatgagtacaaccatagtactcagcaagccacaccgggagatgcatgattaatgcaagggggtacaaggggtaataataggggttaggttttacagtaaacagcatttaaaagtcacttagttgcccaaagctattttgtaaacatgatcctagagctacacaatgttattaatcaaggccgtgaacccacacgaacctgccttaacccaaggcctacgatgattcagaccgaactggcaacccgacctgggtcccagctcgtcccaagccaacccaggccaatcattccacattttagttgttaagcaagttttaaaaattaaaccactaacttgggtacattgctaggcttgccctaaacaagggcgcggctattcaaatagattatactatgaacagaggtgtacatctttacccacaagacacatctttactccgcattccaaagccttggaacccgtcgtaaacatgtgacataaccattcacccatcctagccgtgaacaaaagtaccgacccaacctcgcctacgtccggaatcctgggacaggtaggcaggattgagcccctagcagcagaacaccggccctatgccataacatctcgactaccgagccgcagcttgtgtaaccttcatttgccctagagatgtccatcgggccccgatttcgtccatctccatccgtttccttctgtttaggattagattgagcaccgagttaagccttacccattagatatgtggttagtacggtagtgctttgcaacagaggcccgaagaccggtccttatggtggccgaggtgctcctagcaaaaccacgcacctcgagcctagcctaaaaccattttgggagttttgaatagagggggaaggtgtgtgtttaattccatcacacgcaaaccattccataatgtccaattgatatgagaacttccaaagtctaaagttataaaccatctagtgttgcctaattaatcagcgaagcatctacctaaattcatactagtggaactattaatagagcacccactagctgggaatttgttttcctagggtaagcaaggtgataataaacaatatcaatgataaggctataacaaggattaataggtattgctaaataaaacagtgataacgtgggaatttaaataaagcgataatgcaataatttaaatcaaaatagttttataaactaggattcaatatgctcaagggtgatgcgacttgccttgctcagagagaacggccttccgaaccttcggcgatgaccgcgaaccatgcttcggaaacctccgaaacgacagaagctacgcgaaatacacaagcaaagctacaaccctataaaaaagcaataacaatacataaaaagaaagcacatggttcgttaggttataacaaacattaagagacttgaacgggtcaattcggagttcgtatgaccaaggcatggtcatcgaagtttaatgctgttatatggagatttgcggattattataattaagctttgcaactataaagcatgtgtaagcgctaccctggaaaagacgggaaggctgcgctgttgacaggcggaccccacatgtcaacctaagggaccacggtggaccgagtacatagagacggtccacgggtcgacgaaagcggaccccgtgtgtcaaccgaggcgagtggccgcaaacggactccactagacaccacgcgggctacacacgtagaaaccatgcggctaccgagcgggcacattaacacggacaccacacgcacacacgaacgactaccgacaccggtacacgggtaccggggtcgacaaccgcacaatgggcacagggcgataccgaaaggacgaggagggacccttaccatcacgcgacaaggcgtggaatgacgacgacgaacgggcgcggcggagatggctcggggacgacggaggcgaacagcgaggggacgacttcggcggcgattcttggacgaaggcgagacgcggccggcgcagggcttgacgacgcggagccgaggacgaagacgacgaggaggctacagcacacttgacgaaacgcgggcggcaaacgcaaacggcttgacggagggacgaacgccacgacgatcgggaacgacgagaggacgacgacgaccagggccagtaaggaggcgacgatggcagccgacagcagttgcatagaggtgaggacggcgtggaacacgccgctacaatgccgacgacggaggtggcgccgcgggacgacgagccggcgaggatgaacggccgaccggaagagtacatcgacgagaacgaacgatgaagacgacgacggtgacaccggcggggttcgggaggaggggaggcgagaccgagggcgaccttgccgctgcgatgccaagggaggagacgacgatgtcggccggtgcacgggcacggcggaaggggctgccggaggagacgttgacgaggaggaaggagaggctggtgcggcggcggcggtctctggacgaatccgagggcaggccggggtggagggcgacgtcaccatgccaagggaggagacggcagcgtcggccggcgcttaggcgcgacgaccggggcagctggaggcggcacagtggcggcaacgccattggactacggcaggaacgcgcctccggtggtttccccgtgaaacgaaggcgacgccggggaagaggatgcacctgcgaggccgaggatggcgacggcacggctggccggcacacaggcgaggcggcagaggcggctggaggtggccggcggcacaggatagagacgagggcgacggggagaggtggtgcggccacggggagacgcgggaggaggctaaaacgagagaacggaggaaggggattccattttataggtgaggggagggatctggccacgggaggagcggggaacggcggcgggaatggcggccggcggccacggaaggtgaccgggattgtcgcggccgttccgggcgattaatggcgctattcaagggggaaattagggggaaagagagaggaatcaatggggtttaatccccctaatcaattttggaattagtcatttgaatcgagcggatttgagggaggaagaagctagggttgcacgggagagagagaggaggccgcgcgggaggaggacgacgcgcctggcaggcgggtcccacgcgggaggcgcggtcaacgcgtggcaacggcgcacacgtgcgcggcacgggtgggaggcgcggctcggcttgggccgggcgaaaccgaggcggcccaggaggaggagagcagggagtgggccgggaaggagaggagggagggaggagggaggggcggcccaagagagagagaggtgaggaaaagagagggaggagagagggactttggccgcagggcgagggagaggtgggggcattgggccgaactgggcccaaaggaggaaggaggattatttttagtttttctttttaataaactttgttaatggttgttgttgcttaataattatttccgatgctctgaaaattcgagtaaaatttgaggactccttttagaccaaggagaatttaacaaaaattctccaggccacattcgaatttttcttgtatgtattttagtgtttgccaatttcttttcgaattttaattaattctattattccttttagagaattatttttatttcgggatgaatttatcaggacgtgacatcatctcaacaatccccaactattgacgtacaaggcatctttggttagctaattacttagccaagggtaaccagtacaaccggtgtggtcgtactcatcctttatttagcctgagacatcctttctgctgtttttttcctcgatctctcaagggtagaaaattccaaagtgagcgagaccaagacgagccagacgtgggggacctacatattattataatgcaattcccaaaggaaatcgtccttatatgcaaaaacagaaggtatccatttgcatcacgagttttcactaaccactttcatttcacaaacacaacactacctgtcgggttttaaaaaggttttgtaacccattttcccactttgacaaacaagttatacgagtaggaccgagataccacaaggtggagtgacgtgggattggtgtcatcaactacctattggattcatgcaactactaggtagatctgtcgattagttacatgaaccgaggcatgttaaattaatgtgcacattgcatgcaatttcgcaaacaaaaaattttaaaaactaggagtaatatgatcaaagggtgacttatctcagctcttcatcttcaactcttcgaagagagaaaatcaagaaaaccctaaaaataaaatattattattaataaataatagttccattgggtttatctcaattttagaaagatttggaaagttgaacgggtcaatcggagttacagatatggagatatgatctttggaatttaaaatgatttatggaataataggaaataatgaattgaaattggaactgaatattcagaatattccttgggctaaaggaaagttagaccttctgttttcggtttgagggttggtgggttcagtccaagagagtaggaggcctggtgaggtaggtaaatgggcttcatttgattgggcctagatagtacgagagagaagggagatcgatgcccactttgggcctggtagcatcgtggcctggcccaggtgcgagaccggcgcgggcgaaagtggtgcgcggccgcgggccgcagcctggtccgagggagaccagcgtgtgggtggcatagtggtggtcacctcggccgacgtggcagccacgccatcttggaccgacgggagttgaaccaccggggagatcgatggccggcgacgcacgacagtgagccgatgaatggtggcaggtaggagaaacggttgaagaacgagtgaaggacggggaactcattggctagcttggatggtggagatgggcaactatggacgccggcgatgagagtcgagaggacgagggtggcaacgagagagtgccatggttcggcggcagtggaggaatgcggctatggggaagagaaaatgtttaacttcaagggttttcctttccacaaggtgaccattgtagtatctatcaccccccaccccccaaaaaaaaaatatttctctataaagtgatttggctgtaaagttcttcctcttttctagaggccaaatcaactcatctctcttgtcagtcaaacaaaccccctccacctttatcattagttcttttggatctctcaaattatcccctgtaagtttcttctaaaagagagtttccagcccccatcatctttcacctctctgtagccctttgttgttcctttacattatataggtaaggaaaaagattctttaagggaacatgatcacaccaaacatctcccaaaaataagtactttcactattgttgactttcttttcctgaaacttattcacccaaaagttgatctcatgcaaactcttttaaaattatgaccccctacctcataactctgaaagaaccccttttgctgcatgtatttttttccaagaacttccaaacaaatatcattattgtcactttctagttagtaatccatttacttaataaacatatattcataactcttgtgtccaagaaacctaaacctccaatatctgttggtctacacaaagcctcccacttaaccatgtgatatttttttctttaccacctcgcctgccaataaaatctcctcctcatagagcccccacttaatattttttttagtttatcccctccttgcaaataaaatctctccctcacagagtccatcttgttgtgagtgctctcaggtaacctataaaagcccattgcacacatagttatgcttgacaaacatgaatttattagcacttctcttcccccacaagataagtagttggcttttcaagagtctaatctctcctcggttttcacccccacaatcatgagttctttcttaccaatcttctctccactaaatggtaatcctaaataaattattgggaagtcccccactttacaatttacaatttagcatatctataatttggctctctctctactcactccatcaatataactcacttttctgataattgattttcattactgacatttactcaaaacagaagagaaaaaactttagtgtcatcacatttttatctgtagcaaacaaaattgtatcatatgcatgcagattgtaagtgtgataaaacctcattcacaagatttggaactagtccttctaaaacccgttctctgttacatagctctaaaacctcctctgttgcagagctcaaaatcctttaaaaccccatctcaaccccctttgttgcagagctcaaaatcctctaaaaccccatctctgttgcagagctcaaaatcccaaaaaaaaaaacatcccctagcaagttgacggatggtcaccctgtctcaaaccaatcagtcttgaaatatggacctgtttttccattaatgtttaataacatccaaacaaagatcattattgtcaatttccagtttagtaattcatttacttaataaacatatatttataattcttgtgtcaaacaaaccaaccctccaatatcttttggtctacacaaagcctcccacttaaccatgtgatatttttttcttgtttaccccctcccttgccaataaaatcttccgctcacagagtccattttgttgtgaatgctctcaggtagcctataaaagcccattgcatatgtttgacaaatatgaatttattagcacttctcttccctataagataagtagtcggttttccaagaatctagtatcttctcagttttcacccccacaatcatgagttctttcttaccaatttttctccactcgacggtagtcccaaataaattattaaattataaagaagtccaccactttacaatttagcatatctgcaatttggttctctctctttactcacctcatctctataactcacttttctgataattgattttcattcctgacatttactcagaacagaagataaaaaactttagtgtcatcacatctttatctttagcaaacaaaattatatgtattgtaagtgtgataaactcctcattcacaagatttggaaccagtacttctaaaacccgctctctgttgcatagctctaaaaccccctcggttgcaaagctcaaaatcctctaccaccaccatctctcttgttacttgcaaagctcaaaatcctctacaaccaccatctcttgttacacagttcaaaattctagagaaaacatcatgtagcaagttgacggagggtcaccttgtctcaaacccctcggtcttaaaatatggacctggttctccattaatgtttatgaacttccaaacaaaaatcattactatcaatttccagtttaataatccattaacttaataaacatatattcataactcttgtgtcaaaaaaacctaagtccccaatacttttagtctacataaagcctcctacttaaccatgtgatattttttctctttatccacttccttccaataaaatcttcccctcacagagtccattttgttgtgaatgctctcaggtagcctataaaagcccactgcatacatagacctatgcttgacaaatatgaatttattagcatttctcttccccataagataagtagtcggttttccaagagtttaatatcttcacatttttcacccccacaatcatgagttctttcttaccaatcttctctccactttatggtagccccaaataaaattattgggaagtcccacactttacaagttagcatatatgcaatttggttctctctctttactcacctcatcacagtaactcacttttctgataatggattttcattcttgacatttactcaaaacattagagaaaaaactttagtgtcatcacatctttattttttagcaaattagtgtaagtgtgataaaccctcattcacaatatttagaaccagtccttctaaaacccgctctctgttgcagagctctaaaatccctctccgttgcagagcttaaaatcccctctctgttgcagagctcaaaatcctagacaaaacatccctaccaagttgacggagggtcatcctgtctcaaacccctcagtcttaaatataaaactggttcttcattaatgtttatactcacttgtttacacccaagtttcaaataggtgttttcctctaggagaccggtcgccttgtataggctggtcagaccgcggcctgaactccggtcagaccaccggcttgtgaccgatctgaccgacagagttcgagcccaagtctgttttatcgggtctcgagttttccttactcgggaaggtatgttttgggtttcctttggtttctatccaagttggacgtggaggaggacctgtagaggacaagaccaacccctatataagggacaaggctggttcaattgtaaaagatcatacaatcaatcaaaataatcgttttttttcaatattgctttgtactttgaattagttctagtttggtttgtccatctttgtcgatttgcgctgtatatcgtccactgccgcagcgaaaaattccgttttgcctacgagacgggtagttatctatcgttctatctaaatcggctccgctagccgatttaatctatcaaaacccatcttgacttaacgcttgctgggttggggtggttggtgactctacgatcatgtaacatacccgaattctaggagcgaggaatttccatcaaaaagttcttcaattttgtgaaccaaaaatttccattctaaacctaggtgaagttgatctaactcttgcatgaataaaatttgagggtaaattaaaaccttttcatctctaacctaggacataaatgcaaacacaagtgtagacatgcatactcacatatgaatggtttaacttgagtctttctagtgcatttggatctttgtttgcatttcatattaggtctcatgagcatgattaaaagataagttcactaagcaaaacctaaaagcgttcatgagtaataatattgaagacatgaaaaagaagtctaatattaccccttcaggttaagaggagtccagatataaattttataaacatttacatgcatttagaaatgggaaacatatataaagataagtcttactaattatctaaaataatttgtgcaagataaaatcatgaaaaaattaatgtaggctatgatcaccacatttaattcactgtaactttggtataatttaatatctacatttgatatctcaaataaatcaatcaaactaatcaaaaaatagattaactgtagtttttaccatacctaaccaaaatatgtattgaactgcatagaattatacatgagagataaattatttaaatactagattatttatcatggctaaatataatttttctagaattttacttctcatttcaggtctcataaaaattcaaactagcttccaataagctcgtcatctcctaatttctatgagcaatctatttataatttttgagtgtaaccaaagaaaataaaaactaggtatattcatctacctccaataaaattcacgtgaactcatctgcaccacaaattaatatatgaattaacaaagatgggaaaagaaataatcctgaaaatcatctaaattcattgttcactcaaactcaaacctatacccctcttgcctacctagtgtacaccgctctggacccacttggcagcctccccagctaacccagcctctgtccatttccattttctcaccgctcaacacgagggagaaaaggaaaaccggcgccgatctctctcggacgcgctcgacgcgtggcctcgacgtgtcacacgctgagctcgctttctcctcctcccaactgcatcgccctcattcctactccctcccaaaaccgagcagctcgagagggagagcctctgcctctccgccgctcaagttcttgccgccggccgcaaggatgacgaccgtcgccatcgccgattgagccgcggttgtctcgatctcttgttcgttcccttgtctcctctcagtgctggttccattccccttaagttcagtcgatttcatgcagtcgatgttccggaacacggaccttgctattgctgttctggagcaagcctggagcgccgccgtggatagcgtcgccgttcccgtcaatccggtggatctcaggccgaggcttcgcgccacgagaattgccaagatcccagtagcaagcccatcgaaggaatcgagctgaggcgtcgccatcgaggagatcgagcccttcttcttcaactccggccgctggccgtggtcgtcgattccttgatcccgggtgagcttcggcgcaattcctcactcgtgtagcatccttagatggtctttgagccgttacactccttctcttggcagcccggagtccggatagtggtcgtcatcgtcgccctgtcgatttccgccgccgccgggccattcctcgcgctgcctggccaccgtgccgagccatcgctgagccaaagcccaaaaggcatttccacccgtttagtacatcgtaaaagagggcaaaagcacattacatactgagatgtcttcgcgggattgggcatttgggcgagtcacgaatttctggcgacggggcaacgagccaacgaatgcacataaacgcgttgcatgtgaaaaaggaattgaaaaagaataataatctaatgaatctcaacctacttccttttgaatgtaaacacttttttgtttcagacaagaataaaaacaccttgttaatactgagatgtataatactgatataatagcaacgtttagtcagtcctcctcaaaacgaagtgtcaaatagcaatgcatataattaattatgcttgacaggtcaaaacagtaaaatttcggaactacagcctacttaaggctgcgttcgaacatgaaggtttccaacctctctcttgttttccgcgcgtacgcttttcaaactactaaacggtgtattttttgtaaaaagtttctatacgaaagttgttttaaaaaaatcaaattaatctatttttagaaaaaaaaattagctaatacttaattgatcacacattaatgaactgatccgttttccgtgcccaacccatcctattgaacgtagccaagtaatacagcaaaaactatatttgttagtgaaaactatatcaaaatttataaagaagtggaagagactgctgcacagatgaaattgcaaagagggacatggtaacatggcatttcttgcaaataatagctaaagattgtcaatgattgaaaattcagaaagctaaacaaaaccaatcctgacaacagcaacaaggatttgcaaagatatgaactaccaccaccctttgaactagtgccgaaccaagaagtttcttgtacttggaggatcactcagcatccaagttattatcaacatcatgccatttggcatcctcatgttaacaggactgcaactcagggcaaataaagtgcaacatacatttcatcctgaacagggaacatacagtagaacgtactaagacctggaactcaaagggcttgagctatcaacttcactaacatatccaggaacaagcatccaaaattaccaggttagtttttgtttttctctgcatctcaactcatgaatcatccttccagaggcacgcctttgtgacctcatccttgtcagtgctgctccgagtaagattctgccagagttattgtagggtgttagcatgtgcagcaaaatgtcccaatgcacaccaagctgcattaattcaagtcccctactatttcattgaatttattcactgggtatttcattgaacttattaatcaactgcaggcaagcatattgtacaaaaaaaaaagaaggcgttgggggggggtgaggaggaagtgaaatgaatagaaagttagaaagtaccatggcttgacactttgggtcgcattggttttctgttcataaagttcttctccaattccagttcttcaagtcgaccaaccaggaacagagctaactgcaactcagctaaaagtgtaggaaactctgcataccacatgcggtctacctcgtttgccttatatctgaaaccgagcttcagcaagtccagcctgtgacatacgaaatgtctaatagtgtcaagcagttcaaaatatgtccctcctaactccatatttctttcgttttgctccaagaatgctgtcatgaatgaattgcttcgagccttggtcaaccagatattcttgtaaggaatgcgtcttcttattcttgtgctaattgtactgtaacgtgttataccgagtttcagttgcctggctttatccttctcttcagccagcaaaattttccgaatgaactcatgaatcttcatataagcaatgttaatgttatcatcaggtaacaatgatacgtgagtaccaatcaagtacttgtaccgaaagccatccttttccatcaagctgagtagcatcccaaaatcagggggatgaactgtctcttcacccatggactcggataggagcttcctgaacaaaacagcaatatctctgtagtcctttctaaccccttcaacactccagttattaagagcaaaacacccctctagcagaacaaatttccaagatgatgttaccagaacggtgcttgtggatatctgagagaaacaatagcctgcctcgtgaaacgactcaaccagcacaatcaatgaatcaaagagatatttggtctgttccttcagcttagtgaatgtccattcttgacctaacacattgtatgtctccatcaacttattgcatctagcaaactcttttggatcgaatttcagctgaagaagtgtttcatcaattgtactcttctcagttttagtagcactaggattcagaggagtgttaattttcctaataaacagaagtacagagttcaaaaggaattagaacatggggaaaattcacttattctttgcatgtgattgaaatggtaatgaaaaattctgaaaagaaaatgacagcacagataattgtgtgatgcactaacatgcaaaattgaattcatcctagacaagttgaagtaaaaataacaaatctgactacaaatacaacgttcaattgcatttcagttccattcttgaattaatagattgggtaatgaagcttaccaaaaatcagcaggattagttggctgaggcggcgacggcggcggcggcggcgacgacgacgatggtggcacattggggacatgtgaatttgaacaccacctcctcaggacctgcagatggctagcgcttgctctcagtggttggtgtcgtcgtggcggcgatgatgattgcctccgcagcaacacacgcagtccaatcctctcttgttcgggtggctcgccatggatttctacgacacggtgtgatttggctgaggctctgaattctgatgccatcggcgttgccctccacaagattcgcttcatgcgtttcagcgccgcgagttggtactgaccagcgacgccgcggagatccggcggcggcgcggagccctgggagaggatgccgtggaggcggcgaggagggagactcgaggagaggaggcgatgatccaggcaaatactgaagatgatctcgtcaggcggcttcatcctcccaaccgcctcaaggaacaggttgcccaggtgacgccgaatgtagcgtatccgcgccgccaccaattccgtggaatcgcggcagccaagtggacacggccccacggcggcgctctcgacgacgaggtcgccgagcccgacgcgacgccggatgaagcgtcccccggtgatgaattctgtggaatcgcagcagcgaggtggagtcggccccgcgtcgacgtggcgatcgccgagcccgatgcgacgacgcatgaagcgactccccgctacgaatgccgtggaatcgcagcggcgaggtggaggcggccccgcgtcggcgcggcgatcgccgaacccgatgcgacgacgcatgaagcgactccccgctacgaattccgtgaaatcgcagcggcgaggtggagacggccccgtgtcggcgcggcgatcgctcccttctctctcgacgtcgatgaggaggttgccgagcccgaggcgaacgtcgacgaggaggttgccgagcccgaggcgaggccgaatgaatcctctccccgccgcgaattcctccgtggaatcacagcagcagcgaggtggaggcagcccggcggcgctcggggcgttgctgcggtggcggcatggagggtgcccgcacaccagctcggagtcggagcggtcagaaatccttcgcctgacggtgaggatttcgctggcggcgctcatggcgtggcggcgaagcgggctgtggcgcgcgatcggcatcatcaccagcttggagaaggcctccatgctgctggtgacgaaccggccgggcgccatttttggttggggtgctcgagagctcgagctcgaggaatttgtttgaaaccgcctctcggcttctagaagaagattcgaattggcgagtcggttggagacgaggcataaaatgatttatgattatgaggaatatgggtcgcgagagttagttgcttacttgcttctcgaagcgaacgctattatggacccaaaaccatcgtcacgtcttaacaaaaacgagattagttcctccaaatatctattatataattaaaggaatagaaaaaagagcctccacgttcgctctcatggcctagaaattctcatattaatcggagaaaaagaagaaaaagaaaaaacaaagtccatatagaaatacaatttaaaaatagtgaaattcggaattaaaaaataagggatattagaagaggagactagagtccatatagaaatacaattaggaaataactgaaattcggaattaaaatataaggaatattagaagaggagactagagtccatatagaaatacaattaggaaataactgaaattcggaattaaaaataaggaatattagaagtagagtatatagttcatatagaaatacaattaggaaatgaaagaaatttggagttaaaaataaggaatattagaaatagagtatagagtccatatagaaatacaattaagaaaaaaaaatagaaattcggaattaaaaaataaggattattagaagtagagtatagagtccatatagaaatttaaaactaactaaaatttggaataaacgagtccatatagaaatacaattaggaaataactaaaattcggaattaaaatataaggaatattagaagaggagactagagtccatatagaaatacaattaggaaataactgaaattcggaattaaaatataaggaatattagaagaggagactagagtctatatagaaatacaattaggaaatagctgaaattcggaattaaaaataaggaatattagaagaggagtatatagttcatatagaaatacaattaggaaatgaaagaaatttggagttaaaaataaggaatattagaaatagagtataaagtccatatagaaatacaattaagaaaaaaaaatagaaattcggaattaaaaaataaggattattagaagtagattatagagtccatatagaaatttaaaactaactaaaatttggaataaacataataaaattaaaagtagagtttagagtccgtataaaaatacaatttacaaataactaaaattcaaaattaagaaaaacatgggaataagagtttaatgtcaatataggaatacatatataggaatacaatttaaaagtaactgaaattcgaaattaaaaattaaagaatattgaaagatgagtttagagtccacatagaaatacaattagaaataataaaaattctaagtgctaattctaagtgcgtgcgtgcagatgcactgtcttggtttatccgttttcttttatcacactccctcttgtatcaacgactcaacacattaggaaaaagtagtttgcaaaaaaaaaaaaagatatagcattacttgtgatgacatatatgtggcttggacaagcctaccagagcaatgttgcgacttcttatggataaatattgcaagaagatggcatgttggcaacccaaattgctatccctggccaaccgcttggtgcatttttttttccactagtaatttgcccgtgctaacgctacggtatcataatactttttttaacgaattacatgctagtaaaaataaatttcctagaatccgtccgattgaaccttaatttgatgtaggttcacatattatgacgaagtataataattatattacctaaaaatattaattcaataccgtcaataagtatatcaaatcacttcaataccaatatatgagacaatatacatccacacaaaaataatggttttgtaaagaaaaataattgtcttatagagtaactcacctgcttcatcctcctcaccttatagagtaatacgatcaagagaatcagggatcctgagccactggttcaaaatgtgccatcaatgcggctctcctacatctcatccagtgtttttccattttgatagcaatcaatgagacaacgataaaaatgttcaatgggataaagagagaaccattaggagtaaattgttttttaccattatgttttttacagtgagtaacgagagaccaaaactccaaacggttagtatgtacttcctccgtttcataatataagactttctaacattgctcacattcatttatatgttaatgaatctagacatatatatatctatatgtatgtggacaatactagaaagtcttacattataaaacggagggagtaccagttagagaaatcttcaaaaaagaactaaaactccccacgattacctttaagaattccacctttttctcctatacacaagcctgctacagggtaaacatatgttttcttaggtaaaaaactccaccaagcagctgtccataatgagaaagagcatccaatcaagctgtgtgacattgttgaagagggaggaaatgtcaagcgcctctcgaacctattagacgtttttcaaaggcggaggaaatcccatgtacctctcgaacttctcaaacttgctgtatcttgtacggaacagaattattgaaaaataaatacagattgcaatagattagtaatgtgtgtatccgtttattttttgttgaaggaatcaagcagaaggctagaaaactgcaggaatgcagaaggctagaaaacttcttaatttggtcactgcattatacaacttacacaatgacttgcggcatttttgcactgcactgaacatcactaaagcaaacttgttggttattttttttaacggataaacgtgttagttcttacgtagtacatactaacaaataaacttatgatggtggcaatataagagtctgttgtgtaggcggctgaccggctgccttctcattgtggcaggtagacatgggctgatttcgaccttcccagcaaaatgcattgatttgaccaattgaccccatagaacatactacatccgtcccaaaataagtgcagctatatgtattcgtgtccaacgtttaaccgtccgtcttatttgaaaatttttaatgattagtatttttattgttattagatgataaaacatgaatattactttatgcgtgactatttttttaatcttttcataaaattttcaaataagacgaacggtcaaacgtagatacggatacccatggctgtacttattttggaacggagggagtagctttcaacaaaactctattcagtaaaggaaacatatgaagaatcagtgaagttaaaacaagaaatatattagcttcaggttaggagatttctgacaattatggtgcactgtcaggacgatagcaaagaatcaagaaatatagatcgcttcagaagcaccaaaatatgaaatagcatgagcctgagcagttaaaaattaaacattgcatatggtacaaaagtagaaatcgattaatctcgaggagatatcatggacattgcacaaaacaacggttgaaaggcactatgatcatacagtccattttcttcagacatttttaatacatacacttatttgtctatacaagatgtaattctaaatgtgtaagttgtctatggagtttggacataatagtaaacatgaacatcacaagaaaaattacctgcttgatggtcaatacaatcaccaccaccaagtctgttttgatctttgtattgtactccctctgtttctttttatttgacgctacagtgcaaatcagaatcgttttttttgtttgacgctaccagttcattcgtcctagtcacgtttgttaatttctatcgttgcccttcatctcaacatcgccacggcgctgcctcgtcctcatcgcgaccggactcgctcgccactgtctcctcctcccacgcgccgctgccgttcatgcctcccgtgcgccgccgccgcaccccaatttggcggcaacccaccccgagctgtggcctgtggggcgagcaagagtcaggcagcatggcgcacagggagccggacgtcgggcttgctgctgccgccactgttgttcttgccgctcggctgaaaccaagcagaacgtactgcatctgcagatgacatcgtcgttcttgccgttcggctggagatcaaccagaaccagggcttctcctctccttctgattaaattgtaaattgggcaaaaccaggcaatgaggcaattaaaattggaggaaatgagaaaaaaaaaacaagctggaagttggagaaggcgagatcgaggagctcacttacagagagggtgacgagtgaggagccgaggtccagggaggacatgctgcttggagacgagaaaggaggaggactgaatcgagaaggaccgcttgatctcaggctccaacgccgctttcaccgggaaggtctgagaagaaagggcgacgcggcgtccgggaagagcgttgtgcagcgggttccttctcctgtggtcgcgagcagcggcgtttgggagacgacgagcgagccggcgtcgaggcagcgcgggggagatggcaagggagccggagtggagggagccggcgtgcgcgaacactgcgatgaaaagggatgaagggcaaaatagtaaaatcgctctatccttaattttctcgatgctgtcggaaacgtcatatatattaaaacggagggagtataagaataaactctacatacactatcatgacacgctaaagagaacatgaaaaggaagagaggaaattcgttgtacctgcaggggtggaacagaggatggggggcagcttttggccttgatctgacgaggatcgtcaccaggggtgttggggtcgacggcgagcatgcggccttgaataatcaaataatacacttgatccacctgcataacgatgaggcaaccaaggccatgatcctctcctcgagatctaatcagttcgtccaatactcatagcaaccgttgcaacagagcatgagccatcataatcacacaaaaaaaaacaccttcaaactgtggcactgagtggcgacgctagagggttcgaggagtcgccatggtggacgatgggtttggcgctggggatctcgcggcgtgattttcgggtgggtacgagaaagaggagggggagagggggcaacgggagggggagcgatctgggcgctgatggggttggaagagcggcgaatacagaggtgggaggaggagaagatcaggagcgttggatctcatacgaataatctgaaccctagagtgatgaatgaaagaatgagtgaaagtatttgttgaactatagggtagatagatagaaccgatacagggtgtgtcaatttcattgaatactagtaatctgtctgtgttaacactacagtgacatttagaaacacaatttaagatagatagacatagttattattttgttaattaaattgccacatgcgtaaataacatagttattaaccatgtccaaatggggtcattagcgacaacatagcaaatattcggatttttttattttaaaattttattaatagacatttccgaaaaatatttccgaaaactgaaatttttggccacgccagccaagtagctagtgtggtagcgttgttttgccacgccagcctcttgccactgccacgccgactgtgtgtgacatgacaaagtgatttggccacgcccaggtttaccttaccgtttttggggaggttaccccccaacggtaaccgctaaaaaccgtgtgaatttcatctcgaaaaaattgaattaaaaaattggcggtttcgcggtttggtcgcggtttgacgcggtaaccgcgatattgcagaaaacatgaaaaaaaatgaaaaatactaaaaaataaaaaaaacacttaaatgcgtgtagaaagtagggataattagaataatatatatgatacttgcaaacctaacttgtggatgtaaaataaaaaatgaagcccaatacattttttttgtttttccatttcctaaacaattatcggttttgccctcaaatttgattttatcttactctttgtttttttaaaaaaatcaccatctagcattaaaaaccaagaactgtatccatgattttttttttgcttttttcgtttttttttggaatttttgaatttgctcaaatttcacccaaaccttaccgccggtaacccttaccgtacccccgcggtaagcaccgtggtaaccacgcagttaccggcggtaagggaaaccctagtgtggctaaaaggttcatatttgatgtcacgcccggaaattcacaagtaatttccaaacttatttgtgcataaaatcctcgtccaggaatcagccgaggtacacaaactgacaatttaatatacagattcatcataataataacgttacacacttacaaaagaaaagaaaacagcagcggaaaaacggtctagcgatggcttcagctccactcccacaggcagctcaactggggtataagccaaacgtcttctccttctggatcctttttcttcaactgaggttgattgattattgcaagaatgagtatatgacatactcaacaagccacacagcaaatatgcaagtgcacaaggataccaaaggatggcataatataggctcatttgcaaaagcagcgtttagcaaaacatttaagagaaataaaacagtagagtagttaatcagaaattttaatcaacaccgaacagcacacccatgctgcacaggcccgaccatcctgaacaaccatacccgactgtacagatctaatctccaaaccaggaattatccattccaaaccaggagctaagcaaattattaccagttataacatcattaatcattgtgagaggtgtgagactaatcacgaaaaacattgctcaactcgcccataaccgcgggcacggctattcgaatagttttactctggccagaggtgtaccactgtacccacaagacacagcctcaacatcatgtctaccatgcgtcgcgatactggaaagtacccgaatagaggctgtgacaataccctctgcacaacacaactcaccacagtgcaccattcctggatcataatcacccccttataaaacaaggcatggactccccagcgacccccgtgggcttatctccgccacttctcagtctggtgctccgtaatgaatcatgttatacaaaaggtaaagccgttgctcacgctggcttgtggttggcacggttaatgtttcacaactgtagctcgcgaaccggtccttaattgccatgagcacgaccttcaaaaccatgtgctcacaacccaccattaatcatattttaattaccaattaattatcataacacgattaaccatcgtgagctaccattaagccatcattaaataacagtgagtcataagttatcccaatagtgtgctaatgtttctaagcatggctaagcaattatatctaatatctagttgaaccaatatatataaagctcaactagtccaattataatcacccaaggtatcaaggaataaagtaatcaagaacaaaagggccataacaaagaataggttaattccacccaatgacattcgaaaataaatgcacagttgaaataaatagagaatttaaatataggatcaacatgctcaaaggattgtgtttaggatttgtgtgacttgccttgcaataatcggtcttcaattaatcttcttgaatacttccggcgcactcgcgaaccttcgcaacgacggaaacgacaagctaacacgcaaaacaaggaaaagactaataaaaaccaaataaacaatacataaaaagtaaacaaacatgtagatcataattttagatgaattatgagacttgaacggcctcattctgatttcatatgaatttattatgaattttacaagatttaattccaattaaacctattaaacggagactattccaaattaattaaatcatttacaaatgatttataacggagataaaagattaaagcaacctccggaaaagattagatcatatttggtagatgacatatattaaaaagaaataatatgccactgaaaagaggagaggatttatattgattttggacagctgagattaaccttgaccgagtcgactaagatcggatggcttggattgatctggcaagcgagcctcacgagataccgactcaacgagtcaactccacgtgacatgagatcacctaaatgatcaaccaaaaccggcgaacagaaccgacggctctgaacggctctaaactaaaggacgactcaacacggacgaatgaacgaagcacggggaacacctcgttcgaacgaacgagcgaacgactcaacaacggctgtggctaaaccggtcggctagacacgattcacggtaaagccctggtacgacaaacgataggccggtaggaacctagggttgcacctacggctacacaactcgactaaaagcagcggctaggtttaagcggcacacagctgcgacacggcggcactaagacaacttgactcggctaggcggcggctaggcggaaacacgcagctagggttagggtgacggcacagccggtagcgaccatgcacggctagagcagcagggctgcgagcaaaaacgcaaccggcacggctgcggctgtggcaaagcggcaaacagcggcagcggtagtgatgcatgatagcagcacggtgacggactgcggctgcgctaagtctaggcctctagggcaacagcgcggcaaagcggcaagcagctgcagctaagcggctcagccggcacacgcgcagcagcggcacggcaagcagctgcggggcaacgtggcaaggcgcgacgcggtagcgactaagcagcggtggctaagaggctcggtagagcgacggcaaaccgcagccgcacggcgtgcagcagctacgacacagcgacgacgacacacacgtggcttacataaacatctaccctaggaatcggagaggaggcctcaccgagaaacggtagcgaacggagaggaagaggcgacggctacggtccgacgacaacacacggagacgatgatgacgctagggccaaacaagattagattagatggaattaagactctagggataaactacaccggtgaacgacataggagcggcggttgccggcgaaccacggtacaataatgcaaacggagggcaccgggaggtagagaaggtgacggcgattcttaccaacacttacacgatgacgggcagcgacagaagatggccggcgacgagctccgaagggcggcgaggtactgtccacggaggcgacgactttccggcgatgtgcggcgacaacgaaggggtggccgggcttcacttcgcagctgcgaatccaatggaggcagcggcgaagcttggcgatgacgggaggagcagcagggcttcgcccgagatcaaaacgcgacggcgacgatggagctctggtggatttcggcttcggggagatggctgctgggctccctctccttcttgcgaacccaacggcggcagcggcgaccaaaagcggcggctaaggcggctgctagctacggctggagatcggaacatgacagcaacccaatggttcatggcgaggacggcttccggcgaagtttcggcgcaaggggaacggcggccggggtggagctcgaccttgcggagccgatggaggtggcggcgcaggaaggaggcagatgaggcggcgtctagggacggctggagcgcgccggcgtttggagagagaaggagagcgcggggacagcgtttccggcgacggcggcggacgggacttgaggggatgggtagaggacgactagggggtcctttatataggcacgggagctcgggatcaagcccacaacgacgggaaaaactcgggaaagtctagggttctcgccggaaaaaggaaggatttgatccgcgaaattggaaagaatttccatagaaaattttggggatttcttggggaaaaggaagaggagattgaggggattccattcccgcaactaatttggaaagaggagcaatggggaggtcggattggtgggaggaggcggcggcactgtgcacgagcacggctggctcggctctgtctggaggaggaagatggagtactgtagcgatagggaggtcaaacagactttatctgggctgagaggaagggagaggggaaaggagggaatgggctggattcggcccaagctgaggaggaggatttttattactttttccaattaaattaatcaatgaaatgatctttgaattgttaaaaatacttccaatgctcaaataattccaagaaaaatcttgaacatacttggacactcaaagtacttaacaaaattataattagaccatttaatgattaatttaatatgtgggtaatcactgaaatgctctttgtatgattaaaaattaggaattgagctccaaaaaatccgagaatattccagagagtataattaaccatggagaatttaataaaaaattaaatccatccatgctttatatttaggaaattttatttcccacatttaacttcacttgtaaattaatgaacatttaatataaattctattaagaatttattaaataatttataaatcctgaaacaaaaatcaggatgtgacatttgaaaatatttttcgaaaatgtctattaataaaattaaaaaaataaaaatgtctaaaatttttttaaaaaaatccatacattctctatggaatctgaaatgatcaaactgaatattcgacatgcatgatgagttacatgagtacattggaaaagaaagcaatttgcccaccttattcgataggtggatagtgctttaaactattctgctacacattggcatatccgcttaactaaaatctagatagtgtttaactatttgtgctactacacatacatgggagaattaaaccgtgatgataaacatgataattgttaatctccaaaaacattgtaatagctgaaaaatacaggaggtagcttatggtacacaaaaagatgaaaaaatcatgcagtgaaatttcgttgatatgcgaaacgacaaaatagctgaaataataggagctagcttatgagccgataaaaaaacaaaaatctaattttatatatgcattacgtatgtattgtctttagatatcatacgtcatcttttttttaagggaaactacggcgggtttgaacaccagcctgaactttattcatatggtaaaaaaaaactttacaaagggggaggtacagagggacggagggaagaaactaaaaattagtggttaattacagaaagatttagcgcccaagagtgaagttgttgtttgcctacaacgtcgttacatcggtttgaccacaattcgatatcgttggcgcaacgatgaagaactaccgagtgggcttcatcaatggagttgaagatcttgttgttgtggcgtttccagatgttccaaacggcggcgagtaagatggtgcgccagatccgtggggtgagagcattgtcagggggagggagaccccataggtcttcgagatgtgctagggaggcgacttgttgttcatcgagtccataggagtgccaaatggctgccactccggagcagctaaggaagagatgttccacatcttcgtcgatggggcagaaggggtagcacgcggaagttgcaagtccgcgtcgcacccgcctgtcattggtgaagatacgtcgcttgtgcgccatccaaaggaagatcttgcatttggtttgagcatggttgtcccaagtggtgaccaaagtaatggatcacattaatctatgaccatatatagcactgacaaaagaaagctaataatgattcagttttacaaaatcaatctattgtcttttggggctaattagtgaaaaccattgttaacagaatgtgttacaacaccaagtcaaatagcccataggatggtagttgattaacatgtcaaactaccacagtcccaggttgaggctgatcttgccaaaggagtggtagaccaattggtggagttcagccttcttggcaattccaacaccttccctcctcaacggcacctcaagtgacaataggatggaaaagaaacaccttcttagtaaatgatagcgtgtatctctattactttaaaattctgtagtggtagcggtgactccaaccctgacagacacacgcaatcgtacccattggatccagatatctaacgcttcagaatgcgtgctattggcagacacgcacatcccctccccaccccccgagtcgccgacctctcctcgttcctcacaaccaccgcgatctctcgccctcgatggctcgatccctctctccgccgctccctccaccgctcctggcatccaccgcgcctcctccgcgctctcctccccatcgccactgcggcgcctcgctgaaagacgtcgtccccactcatccatccagggcgtcatcgtcatgcgatcctggtgcagccgtgacctcacgcacacgtctctctccatagattagggttggggactcgcggctgggtggttgggtgaagcagcaagccagcaacgaggtgcttcggcgagccggcgatagcgaataagtggaggcgggcgcaggcatgcaacagcagccgggcgccgcggtggcgagccggcgagcagcatatggcggtagagcaggcgagggcgcaaggcaccaggcgactgccgactgggcaacgagaccaccgacgctgacagccgagcagctagcagattaggcggcgagcaacagcagctagaagaacaactaagcacccggtgaatcaatagttaatagtcactgaattaatgtctgaattagtcatggtcttgcactcttgtcctattgctttttttctataatgctatatatgcttaatcactgtaaatatgtaatctatcattctaatgaagttcaacaagaatagtatgagatttattacaagaattgagcctcatgttccatcgttttgatttattaatttgctatggagaagaaaacaacattgttaaaatattataaagcaattaaagtggcaaccttggatcgatgagagcgcaaactattctgatttagattgtgtatattgttgaccatgagatgtacatgattctgatttaaattatgtatattattgatcatgagatgtgcatgccatttttcaatcccaggaaagcctaggtccaggaagaatcaagcggaagttcagggacatgcacttgggaatctgctgaagttttctctgacatgatacggtgagactgtctttctctgaacttcttctggaaagtgaagaagttttgtgccatgcttagatctgttcttgtgttagttggtactctcttcagccagtaaactagcagagacaacgcttccgtttgcttgtgaaatcaatttttaatctgcgtgaatcaataaaatgttatatcaaatatttttgtcaacaatacaaccaaatatctatgcatcgaagaatataagcaaaaaaaaaatgccttgaccatagtaatcatttttaatttccgtcataccattagtctatcccaagccctacagctttgatggagctgtttgatgaatcagcgagcataggcacctcttccttatgaaactcaacagatccaactgaacctatgtggcctgattcacattgcacccaaatttagaattgatagttgagcgtccatcattaacagaaagcatttaacaatcttatttgcacaggatgaggttcatctgaattacaaataaatgtgcatggcccctatggccctatgctgcaatatgacataggtagaaatcaacagaaagatatatccagctcattcaatctaccctatagcgatcaacagaaaggacataggtagaaatcaacagaagcttttggattatatccagctcatgatcaactcaccagattatattgatgaatcactggaaaaaatttcaccacatttccatgcatacaaatgttgggggataaattcaaggccaacagcagtctctataaggatcatcaaatacaaacaggaggtggtgcgggggggggggggggggataaaatcaatattctcaaagatatatggttgtccctatagaatagtagaaactgttcatttcatacaagagtgtacacgtcgattttatcagcattagtcagaaaataacctaactaatcactgtgcaccaatctaaaattcagggattagatgaaagagtaatctgcaatattatggtaacttcgacatatattttgacaaaatttatattagagcaagtacccataaaccataatagccttctgaacattaaatcacaacatgagaggacctgaactgtgatttgcagtcaggaaaaaccaatgatatgaattagtaaaaagatttacaaggaaaaaccaatgatatctccaagcaaaatatatcatctgatttacaaggaaattgggaaataagaaatataaattaagcaaagaactttactgtcccctcacggacccaatataaattaagcatttgattttaataaatataatctgaaacggagggagtaatagctgattaaagcacccaataatatatttcgctgataagcttgtacatctccgacttgtgcttcacgaggcggagcactccagtgtcgtcgcagcgctccacctcgacggcggtgaacacagcgaacagctccgggttgtgttgttcgtcggcgtcgaagaagccggtctcgaagaacctggcgatgcagaagttggcagagcccaggtgcacgaggtgggaagacacctgcgtcaacgccttgggcggcgtgtactccagaggaaggaggctgtgctgctccggctttctcccgccgctaatgagatcagacgcagataggacgttgtcggtgccggacgcgaggccatagaacaggccgtgctccggcacgtacacggcgaggccggtgaacggcatcgcgcaccactcgccgccgctcgccaccgcgctccactctccgcgctccgtgtggaacctgtaggtgccgacgccttgcttggatatccagatgtccaccccatccaccaccgcgtaggagtcgaattggaagtcgccgcgttgcttcaccatgtaaggaggcggcgggagagtgtggcaacaccagtcgccgtcggcgtcggtgaagctctccctactataggttagggcgtggaagcagtgatcatggccgccggtgaacgggccctggatgtcgtcgaggatgtaaaggtcgtcgtcgccgatggtgagggacacgggggagaacttgggcatggggagggtgggcagggagcggacgacgtgctcgtcggggtcgtacaggagggtgcgccccgtcaggtcggtgccgactatcttgttatgccttccaccaaggagcatgaactccatcgtctccatcgggcagaccgatgcacggaagctcatcaccgggcatggcagattgccgtactccaccgccgccgcgccgtcgtgtgctccggcgtccagcggcgttgccaatttacgggggaggaagaagcgtgacatgtccatgcgccgcactgtgtagttgccttggaccttatcaagcaccagattcacaaatcgccggtaactcataactgatcttcctcctccaaattatgaacaggaatctactagatatgtatatgcactagttgcatatacgatcgatcgattagttggatttatccgaaattctttgtgcttcggatgttaattgttcatcttgttgattccaacacatcgaggcagcatgaatatctgtacctcgatttctccttgtacaaaaaccagaaataatccagcaattattactcacatctcccactgtattactactagtataacaattaggatcaaaaattgcgtagagtacctgcgatttacgaaaaaaccgactccggatttacttctgtccgccggaatccagtcgagtgttcatctggatccgatcgatatccaccggatttctcctactcctcctccacaacccggttgaatgcaagcagatggagaagcgaatcaggcgttgggttgcggggacgggcagcggcggcggcggcggcggcggcggcgattttttattctgctgcgagggacaaggaccaagacttatgttagggttatgtttgggctcgaatgggccgagggccgactaggcccataaagcgaaggttcaagtttgtctcccatatcctgattttcctttttcaaaccaatcctgcgattattttttccccctccttttgcaatgacaaattgacagtcctgcatgttgatttcgtctaggagggttaacttgagaaacgtaccaacaaaagcaatggatgctccacgcaactcagataagttatccagacgaggagtggtgatggtagtcaacaggtgggtgaccagaaattaacgttaactacaatcatagcttaatccatgcaaatcaacatcttatcagctttaattaattggcattataatgcaagcttgcttgctccatataaattggcacagagagaagaaggatcaggagtgcacctggcttacactgatcgatgctgttctcagttctcaccaccatttttacctcgaagatttctagattcgatcagcaaaccaattggaagcacaatgcagttcaggctggtgatcttggttctgctcctctcctgctcgcttcagctgcttcgcgcgtttccattccccatcccgttctttggccccttcacgagcccacaagacggtatttttttgcaacacttgtcagttgtcaccaagattttgatttcagacaagatgattttgatgtgatttcgtcgcttgcagttgatgcgataaacgagctgtacgcgtcgctgggctcgcctgacctccatggctgggcttcttcaggaggagacccctgcatggaagcatggcagggggtgcaatgccttggacccaacatcactgcaatgtaagtgtaagcttagcttcactctcacttatgctgctggtaattactgattattagaatgcttgactcttattgatgctgctgataattaccaatggttactctgaatctgtaatttctgacgaaagtatcaacctgacagagagctcagaggtgcaggcctgggaggaaagctgagtgagacgctggggaagttcactgccatgacagcattgtactgacttgcacaatgcatttttttcatatctgatgtctctagttcttgttcttgctttgatcactgtatgattgttgggacagggatctgagcagcaaccgcattgggggagtgattcctgagagcttaccacctgcagtaaaacaactgtgagatgcaggcagatgtgttggttgagttcttcagagatcagcatctgtggacaattggtgaagcttactgatggttgttcttggattgtgttctgcaggaatttatcttcgaatagtctcagtggcaaactcccagattcgatggcgaagctgaactcgctttcgacactgtgagtattatcctccttaattgtgtgcagtaatgttctttgtttatctctgaatttgcaatgtgtccgcaacttgtaggcatgttcagaacaatcagctcactggcacacttgatgttctaggagatcttcccctgaaagacttgtaatcactacatcaattcacacatgctctgtccaggaaaaaaaatcacacatatttaccttgatgcatttctcacctgatcctctcatgatttactaatatttgcagggatatagagaacaatcttttctcaggaccaatcccagagaaactgatcaacatcccaaaatttctgtaaatctctcagccttcctcaagaacagtagaatttaatctagtggcatcccagtctgacacaacagttggttcttgattgtgtgcaggagaaacggcaaccatcttaccatccccacgatgcccggctcttctccaactccggataccatccccggctctcctccgactccggcggcagcggtggcggcgcctcgatcaggtgcttcacaccctcctatatatgtaattccggccactccacatggcgctgcacagggtgaccctccgagacacggcaagaaggtctcgccggcgaaagccgccggattcagcatcctcgccgccggctcactgaccattgccgtggtcctgatcgtcttcgccgtgtcgaaacggcggcgggagacgtctcttcatggaggatttctgagaggagttgagatgagcactccggattggagtgggaagccttcaggacaaagtgcagttgtcaaggtagacaaagaacaaagcacaggtatatacaccgactgaaaactggagtatttcctatcttgggcccacatgtcagtgacatattaagaggtcaatcttagaacaattattaatgctcaaaaaattcagtacataaaacgctagcttgtgcagtcatctcatctacattttaatcattttgtttgttgtgttgatcactgaagttgctgaagagaaggataccaagggtagcatttcttcatatcagaagaatgttcaggagagtttacaaaaccatcctttgcaattcaagttcacaatcttcacagttgcatccttgcaacagtataccaacagtttcagtgagcagaatctgatgaggcaaaccctgttcggaaaaatctacctagcagagcagcaagacatcaaggtatctaatcaactgtaccctgaaatctccattccattcctacatggattgaacaagtttatttcttgatcagttgtaatcaagatcttgtcatttcatctctgatctctctacaccttatactagtttgcagtactgaagcttgacgaagcgatggcgagaatgccggtggacgagttcttgaggatggttcagagaatctctgaactccagcatcccaacatcgaggagcttgcaggatgctgcgtcgagcacggacagaggctgctcgtctacaagcatttcagcgatgaaactctcgacgacatgatccatctgaagaaactggcatcatcagacgatcctgctgccaagatcactcttccatgggatgcccgggtagctgtcgcactcgaagctgcgaaagctctagagtacgccattgccatgatcatcttcaatttgctgaataattcgagtgtttgtcttgctggcttctgaatctgaagtgagtaatcggtaatcgcttctgccattgctgttcttgcgttaggtacctccacgaaggtggtcagagacaggttgtgcaccagcatttcaggcctgaacatgtgctcgtcgacggcgagatgcgtgtgcgcgtgtccggctgcggccttgctgcggctgtgaaatccggcttggatcttcaggtaatcgtttcgtagacaccgcttgatcgatcagcttgttcttggatgtgcatctgatcgatcggtgtcgatttgagcagtcggaatgctggctcgacgcgctgagctacgagccaccggaggcggcggcggcgccatggacggacaagggcgacgtgtacagcttcggggtggtgatgctgcagcttctgacggggcggaggccttacgacggcgcgcggccgcggggcgagaggcggctggtggcgtgggcgagctcgcggctgcacgacctgacggcgctggagaagatggccgacccgcgcctcgggacgccggcgacggtcaggtccatgtcgcggttcgccgacgtcatcagccggtgcacgcagcaggaagcggagttccggccggccatgtcgcaggtggtgcaggatctgcggcgcgcgctgcagcctgcacgcgatgcttgcggacagcagagctgcagcaactgattagtgacgaaaatttactaatcccgcagttccgaaaaaatatatataacaccatataagacatactctaatgccctatatttatgccactatcttgtgttaaatctattatattttggaacgaaggttgtagtaatatttgtcatcctcctgatttgcgtgggttcgatttaaagttttagacagcgaaataccatcagaaaatagatggaaaagtggaataccaacggaatacaaagggaggaaggggcagttcaaattgatgtcattttcaaccatatctttttttttgcaaagttgccaaatttgataaatacataagaaatcctgctaaaattttggcaatattaccatcttgctaaattttggtaaggtttattttggctacaatctaaacatgcccgaaaagtctctcatgttcaacatacacatttttctcaagtgctaaatgatatgtttttcataaaaatatgtatagagaaaagttgatttaaaaatcatattaatcacctttcccttccggtgatcattaaaaaaaatcatgttaatctattttttaaatttgaactaattaatactcgcgtaaccacgtgctattggattaactcattttacgtgtcttttaaaaaaattctttcacataccctcaaacatatcctaaagtaagtatcgctaggcaatattctcgcaatatcttcaacctcccatatgctaaaatcaccgcttgtcagatatacgctgatgatttgcaaccataatccacttatttctttcatttcaaatctccaaacaaccaaaatgaagagaggctccaggtccatgtagatttgtccacataagttgaaaaataatggtcaaagttttaacatctccatcacataaagttgcgaataaaaaggtgagttgggaggcgtcgtttttatatttttaaggatgcaacataagtaacaaggcatttatttgatgattgaaacagctcaacgatacattattttatttttgttgtttcacaggttttacatgcaagagacaaaatatattgcaaaacagtatagttatgatttcatctagatgaaattcatttcgtttctcacttcatttatctcttatcatatcataaaaatattggcacggcacccaatttaatgagaatgaaacttatattgaaactaactatcagaattatgaataccacatacctaatagtagttgactaaatctcggcaagacccaccacataccatgttttatacggaaacaacctgcggatatgggaggagttccggataaggaaagacaactagagttctacatggaaacgacaaggactacgcggattgtatccatattggtttccctagttctatttggacaaggggatacctatgggtataaatacaaggtcccctaggaggagaggggacaatcaacacacccaccatgaaaaagacccaccatagaagacacggaacaataaatcaagacagaagatcagcatagaagccagcatacgccaagacaagacgcaggatatcgacttcagagataagtacagttagtcccctacggtgtctccggatactgtcaagagagacgaaagcgctgtctctgatctcgtcgggcacgaactcgaggaagaagactaccctgttgtcgactacgagtcagacctttagaccgccatgtcgacaacagttagataggctaccccaaatattgtactggtgtgattatggtgaataagagcaataccggcttcggccaacaggatgtagggttattacctgacaattcaggggcccgaatctgtataaaaatccctgtctccatctattttatctcagtctcgcgtatatcctagtaccgacgatccccataccatgcaaataccggaatcgcgacatcaaacgtcgacactaacattacttagtaattcaattcatttcatttcttaaactagacaaatcttactgcatataattgtgtggttgattgcctatccaatcggtcggtcctggacaaacggaggaacggatagacacgggggcggttgttcccatgcacgaatctcaaagcactccatggttcggctaggacaagtcacaagccagatctcgtccacctccattcttcccttcccattttccgcttttccggtttcctcccacccaccccgcaccgtactcaatttctcgtcaatctcaggaaaaaaaatggtgcctcgccgcgacgagatctgagagcgcgcacgcgcgtcctcctcgccctcgccctcgcctccgccgcgcgcgcgcgcgatggcgtcatgcgcctcaccgtcgtcgcggttgcacggcaatgcggccggcggcggcgccggcggcagcgccaccgcgatgatgctcccggggccccccggccgcggcaacggcgggtgcatcgacctcagccccgcggggctcctcgcgcatggcgcggggagcagcgtcgtcatctccgacccgcgcaccatgcagctcctctgcgtcctccccatgccatcctcctccctcgcctccttcgtcaccgccgtccgctgggtgccacccagctcgcgcttccacgccgcggggatcgacgacgacgacgacgaacgccgcccgctccgcctcgccgccggcgaccgccacggccgcatcgccgtctgggacgcgcgcgcgcgcctcgtccttcactggcttaacctcgacgagacccgcggtgtcgcgccgggatccggcggcggcgtccaggacctctgctggatccaccatgcctccggttggctcctcgcctccatccatgggccctcgctgctctgcatctgggagacctccaacaaccctagtgtcctctggatgttcgacgcctcgcccgagtacctctcctgcctccgccgtgaccccttcgacgctaggcatctctgcgcgatcggcctccggggcttcctcctctccgccatcccgcggccggactctgatatctcgctccaggagcaccgggtgacctgcggcgccagtgacattacagagctgcagaggctggagaaggagatagcggcgcccccgccctccccggccctcgccgcgtttccagcattcacgccgaagctatgcttctccccgctgtggaggaacatcctatatgtcacgttcccgcgggagctcattgtctttgacctcaattacagtactgcgctctctgtcactccattgcccaggggatttggcaaattctctgatgtcatgtctgatcctgatttcgacctgctctactgcacgcacattgatggcaagctgagtatctggaagcgcaaggagtgagtttacagtcatacttttcatgtggatactgtagaattagaatatagaaaacatgtctattgaattgtgtccaaatgcccgaactcgtatgaactaaatttgcaataagactgtggtggtcaagtgcaatcaataggctacatagaaaatgcaggaacaaaacagaattcaaaatggtgcaagtacatagtaataaattctagataaacttggaaattccttacatccttgggagtgtgctgataaacacataattactatgaagccattggagtttcaattatgttgctgtgtaaaacgaatgaataatcagtatacacacctgttagtgaccgttgatctgtttattaatggacacaattttaatgaaatcgtacattatactatatatgttttacaatctgttcaggttattgacatatgggcttcacaattgtgaaccaatatatgcatgatcacattacgtttgtacataaatgatacacttctttccagtatattaagttcctctcgtaattcttttttcttttccggttctaggggtgaacatgtgcatttgttgtgtgcggtggaagatctcatgccttcaattggtacaattgttccacctccagctgttcttgctactacaatctggcagtcagaggctgttttccgtaacatagagaagcaatcacgggacttgggacaaatacaatctacacattctgtcatctctgatacaaatacaaaccaaaatatgtatcaagggaccatgacatatctaacctcgatctctgaagatggcaagatctggtcatggcatttaagttttgacaagtctgcatgtgctagaaaagataaactaggtgcgaaccagtggtcagttcagtgaaatagctatttctggctctcaactgtgtaatttactgatgattccatttctgtcactaatgttgggaagggaccaggtacatcgaatcatagtgatgctggaatttccaattcgcgctccaatggacttgattttaccgtaaaggttgtagtgtaaacttcttccttggtttctgttgttagggtatcaccatgattaagcaggaatagtggttctttggaatctgaattccctatacttctatacaaattccctatacttctatacacagctcgattatcctaaattaatgggattgagatgtactccctccgtttctattttaagtttgatcaagtttctagaaaaatttagcaatatctaaaatatcaaattagtttcattaaatctaacattgaatatattttgataatatgtttgttttgttttgaaaatattactgtattatattgttctataaacttggtcaaacttaaataagtttgactaggaaaaaagtcaaacggcttataatattaaatagagggagtacatgtttagtcatcaatcaatatcccctattcctggcgcttatgtacttcccttatgtggtttgctcatttgtgctatgctctgcagattaatttgatgggccagcttcatcttttgtcctccactgtgactacgctagctgtgccatccccttctttacttgccacagtagcccgtatgcccatgaccataacattgtaccgtgttctgaaattataggttttaaatttgttcaacattcccataacagaaaactttctttttttctatctgaaggtggtggaaacaatcctgctccagcagtaccacttgttgctgtaggaactcagaatgggactattgaaattgttgatgttttagctaatgcaatatctgttagctttgctgtccatagcagcactgtcagaggattaagatggcttggaaattcacggcttgtttcattctcatatagtcaggtactcaggtgcttccatgttacttctgataaatcttgtcttttataaaccaagtacctacatattttgataatgtgaccaattaacattgtggcaatcaaaggtgcttcattactggaatctctgatactattctgtttcttatagtgccctacgttaatattatcattgatttgactacaggccaatgacaaaactggaggatacaataataagcttattattacatgccttagaagtggacttaatcgctcattccgtgtacttcaaaagcctgaacgtgcaccaataagggcattgagggcttcctcatctggaaggtggttctatctctcttacctagaccaatctctgtttgtgcccatacctttttcaagttttaaccttttacatttcaatatgcatggatttggcacatttatcacagctatatttttcatctcaagcatagttttactttcttaggtacctcttgatactgttccgtgatgctcctgttgaagtatgggctatgacaaagaaccccatgatggtactcctttctttgctctataattttgcaaactaagaatcagtagttagctcttgttaggtcaggatcgccataaatcctagtatatgccttcaaaatattgacttttgtattcccaaatattatggaagcaaatgtagacacattctttaaagtaaacaaggttgcaccatgaattattctaatcggagtggaataactttcataatagcttcagtaaataaaacatgacatcaacgttacagtcattcgcttttttctaccactgtttgtagcttaggtctttggcccttccttttacggtgttagaatggactttgccttctgctccccggccaggtcaaaacgctgcatctaaacaatcgtcaacctccaaggagcggtcagcaggtattcactgactagcagaatcttattccatgaaacccatgtgttgcctattttattcgtttaccttatttcttggctttctactctacccagggtgcaatttttaaaaattgtgaaatgactggatctattcttgctttcagaggctactggtgcagaaagtactgatgaaacatctgaaagttttgcttttgcattagtcaatggggctcttggtgtgtttgaagtacatggacgccgaatacgggatttcaggtaatgaaattgctgatgttatagctgtcagcaatgaaaagatcctcagatgcagcttttgtcagatgatataatgtgatacaaagtatatttaattatatttttgccccgctcaattcatgtagccctcaactaaattctactagagcgttatggtatctgcttggctagtgtttgtactgtgttgtcaggcgcaatttgtaaatacaatctgttatcatcgtccctgttttttacgtgaatagtagctatttgatttgtccagtagtaacatgccttttcgctcttacttgcctgatccattgaagcttcctgatttttgtaagggaagccataacacaataaaagataggttttgcaagtatgttttggaaatgatagatagttttgcttcccattcagtttattgtagatgtcaaggtatgctttgtattctcaggatgattagtatttcttgagctaccgtgaaccaggcgggagatacttggtgcctttaggtttatggcataaattaaaaggaaagaaaaagaattggctccgtaccatcagaaagtggcataaactggaacagtgtgtgtctgcggatgaaatgactgataaattggctggtattttcgaagtcgtacggaagtaaaataagaaagtatgattgcccttgttctagtgacatgatatgaaactgaggcaaaacattgtgtagtaaatttcagattgaagactcacttatttaagtataacagacttgaactaaaactgaagtaaatatgtattgcttttgtctccattgctgagcttacttatgtagtttctgttcatatgcatgttgttttattttacttttatgcttaaactctatcaccatattgcatggtaattacatgcatgatccatatggttacactaacaattgtttttcaggccgaaatggccctcatcatcatttgcgtctgcagatgggttggttactgctatggcttatcgccttccccatgttgtatgtacattgtgtcatattttttagttccatcttccagtgttctttatatgtgacgtgtttgtaacaattatttttaggtgatgggtgatagatcaggcaatattagatggtgggatgttacaacaggcctttcttcttcttttagcactcacagggaaggcatcaggaggattaaattttctcctgttgttcatggtgatcgaagtagagggcgcattgctgtgctgttctatgataatacattctcgatatttgacctggtaagtacaaacaaaggtgacactatgttattttctagatctcagattcattgctagcagtcctactagcggtttctattttttagaaaaaaaatctttttttatcaaacatctccttttgttttctcagttttttttctctatatatttgtagcaagctcttgttttctttggagtacagaaaaaaaagattgttttattgtgtactgtgtagattactctagtttgacaacttgaggcataatgagttgcatgcagtccttttcatcctaatctaatccatgcatgttttgtttttcatttcaatatgcacattgtctttcacttctcaacatttctgtacaacttttgtatattgtgtgatggagctagttgaaacagtactgagatcaggaactatgttttaggatagtgcagatcccttggcaaatgctcttcttcagccgcaatcacctggtacgcttgtcttggagcttgattggttgtcaacccgaacaaagaaggatgaaccgcttgtgttatgcatcgctggagctgatagtagtttccggctgattgaggttaacatgtatgtcattttaatttgcattttatttgtttatttcagtacgttagagtcgtcgacttacagttgtttcaagacatgacttgtcatctattaaaattcagtagtaatgtgtatgactaacaaaatgtgtatggaggctttatttgtacccttcatgggctgttaaataccttgctaatttacctgacacttttcttaacatacttgtgagttctgaaagaacctatgagcatgtagttaatttatattgtaataacttagttttgctgataattgagcagttgacatttatcatggttgcagctaaatattgagtcaattaaacctgatgctgaaaaacaacctgtttcatttttttagagcatgttaaagagattgtgaatattaagtgatagatagatcaaaagaagaaaagagacgaacataagaacaacacatcgagcactaaactggatctaaccttagaagctgaactgtaaccagccattcgagaacgaaaaagagttggaatctgttgagaatatgatttgaatggagcaagcagtcctatgatgctttaaaccttataagtttggcatgatgcttgctttgtgggttatgatttgatttctgattcgttctttttccttttaatttatgattgttagaaatcatacatgcaaattgatttatgattgtttttttttttttgtatctaacagcgatcctagggccagttctactttgaggccagtaactacaagagagaggtttaggccaatgccattgtgtctgccaatactatttccaacagcacatgctttggtatggtgcatataatttttgaaaagtgacattttgttttaccatgtatctattctgctacatatatactccctccggtttcgtaattcttgacgttttggacaacgacgatctccaaaacatatcattggctatgatttttattgtatgtgtgtgtgtgtgtgtgtaagtcagtttatgtttattgaagtattttttaagactaaacagtatatcgtgttaaagtgtcttcagactaaatattttaaaagctattgattgtcaaagttctaattgtttgacctcaaccttgtccaaaacgacaagaattatggaaccggagggagtattatatagtatcttttgaaagagttatttcatgaatcacatttgccttcatgtgcttgatatgttgcttgcagatttgtttatattccttccttcagatagaattaaaccaatcaccatttaaaatcatcaaacacaataggagaaagtgattatgatcaatttcttcaaataaatcttttttgtgttgtgcatggcgtttctaaccttcttaaagattgaatgtgaagcactacaccaccactaatacttttgtctctcaggctttgcggatgatcctgcaacttggtgtgaagccatcctggtttgaatgcaatagcggcgataaattagctagtagcagctttaaggaagcaccagcaacttttggagatcttcgtagttacatgattgagacaaccctgcctcccattggtgattctgtagtggcagaattgctgctaaaagtgttggaaccatacagaaaggacggtatgtcatcagttcgtttctttagtagatgataatatgatatatcgtgaatgatggagatattctgctttctgtttgttgagaagggttcattcttgatgatgggagagctaaattgtattcagctattgtgaataagggaacatgtgcaaggtttgcatttgctgctgcaatttttggtgatatccaagaagcacttttctggctgcagctacctcaagctcttcatcattacctggataaatcgacaagtagatcaagcgagaagggctcagaatcaagtgtgcattatcattctgagcaagcctccacattgaacagggcatcatcttcaacggagagatctgcacctgaaaatatggcgaaagttgctgaggtaataattaaatctgatgtctgtaatttccggcctacatatatttatctacttttgaatttggtggtttctccattgtacagaattgtggacaactaagttcaatggcatttaggcaagagcaactatggttcaatgcaaatgaaagaataccttggcatgagaagcttgatggtgaagaggctttgcaaaagcgtgtccatgagtaagaaccaatcatgccaccttttattttatgaaattttaacacatctggcctatttgtttgtgccacatgtttttcacaatctttgtactcaggcttgtctctcttggaaacttggaaactgcggtgtccttgttactgtcaacacctcctgaaggctcaaatttttacccaaatgcattaagagcagttgtattgtcatctgcggtatcacgatctttacatgaacttgcagtcaaggtgaacagccttagacatcgatatgatgttcttcactttggtacacagcatgtttagaaatgacacagtattaagtcatgaaatcttgtaggttgtcgcagccaatatggttagaacggacaaatcactatctggcacgcatcttctctgtgctgtgggaagatatcaggaagcatgttctcaggttttacttaacatctcagctgctacagcataaactcttattctcttttgcttaacttaattttacataagcctggtctataacctacaagctggttatgtttcagcttcaagatgctggttgctgggttgatgctgcaactttggctgcaagtcatttacatggttctgattatgcaaggtaaaacttttctgaggaaagtaaatgaaagaattggttgaacatgcttgtaaaatttatcttcttttcatctcaacgcaaacacagctgcaataaccatgagaaggtggtttcaacttgtttggtttagttgttgtaatatccagttagtgtatgtgcagtagttatgctttatctgaaaaatgttgatgctaatttggtgatatcaggttaatgagcagacattccttttctgcagcccaaagtgaacataaatgtcttgcctgaagcacttaaaagtgacactattttgttctcctttctcttgatgtgctatggtaattctaacttgctgtgcgtaacccatgcagggtactccagaggtggggtgattatattcttcgcagtgaacataatatgtggaggtatgttgatcccttacagctacaggatttaaacaaattcatcactcctgctctaccaacacatcgtttgtccttccacagagctctgatactatatgtagctgctggagcactacctgaggctttagaaacgcttcgcaaaaaccaacgaccagacatcgcggcgctgttcttgcttgcgtgccatgagatctattcccagatcaccacagaatcagagtcatcagatgacacgccagggtctggatcgccgacatcggaacagagccccaagctccggttcccttccaagaatgtggacgacgaggacctgatcgcggtcagcgaggtcttcgggcattaccagcagaaattgattcatgtttgcatggatgctgaaccaaatgtggattgagccctcttggcgccatgccatgccatttgccaattgccatgtgggagggaggccctctcctggatggacaatatccgaagctgaaagagaccgagtgcccccactggtctctactactctttgtagatgtcaacgtctagcttttgcttctccatttttgtctggtgtgaagcttttttttttctttctacaggatgtatgctgcctgcatttttgtctggtgtgtaatctttttctacgggatgtatgtcgcctgcaaatcttgatgctggacagagccgcgttgcgccgtatcctacaaaagacgccgatgattagcattgctgatgtggcatctgtacggagaacctgataatactacttgaaagggataggcattgcggtgttgtattgtactagtaggtgaggacgcttggcactggcaatacttttctgtaagaatatatatatctgtacattttttattgctctttctcgctcaggctgcaaaaacagaaatttggaagttgtagcacatatgtatcgacttaaaacatatttaggtttggttttgaggaatcaaaccatccagaatgagaaaaatccctactttctcatctagaattggtgatccatcggtggacaattcctcaattctttttttgacaggacaattcctcaaatttggtagaatgtctccattgctcatttcttttctactggtacttgtgagttgtgagtgactggggatcatgggatgatggataaacctattcaatttctcaaaccaacacccccccccccccaaaaaaaaaaaagaagattaaccgatcaattgaccaacccaatcctcaaatatcctccatgttactattaggccatgtttagatgggactaaaacttttaagtccctatcacatcggatgtttgaatattaattataaatattaaacgtagactattaataaacccatccataatcttagactaattcgcgagacgaatctattgagcctaactaatccatgattagcctatgtgatgctacagtaaacattctctaattatggattaattaggcttaaaaaaattgtctcgtgaattagctttcatttatgtaattagttttataagtagtctatatttaatactctaaattagtgtctaaagacagggactaaagttaagtccctggatccaaacaccaccttagacgcttgacgcattgagtcgtcgccatcaatcaatcatgccctattaaaatcttgtagccactgctatggagtttgatgaaagcaacctttttctgtcctagatgcctaaaatcatccatgaacctctgtaattaactactccctctgtctcataatatagcaacctacaagacgagacatttcatattacaacgaatctagatagatgcatgactagattcattgtactataaaatatcacatctgatcctagattgttatattatgagacggagggagtactgtagtattactttcacgcaggttcatttcaggtccaactttcttggccacatgacatcttaagataacatatttggcatagttaatcatcctcagacaaccaatcaaggaagcatgataagcaaccactaccataacaagtagcagcaactttctatccaaattacattactggcccgaaacaaaattccattttggctctgccaagtgccagccaaccaaccaaccccacgtttccatccaaattaatcaccaaacttatccaaatcacttaattaactatattagaccgtttgacacgactccgaaccggagctctacctttttccgaagtttgagcctaacgaaacggtttcaaaatacaagcaagatcaatagtgcagcccactattagctctaaatcatctatagtcaatataatagccaattcatataatagttgcttactatactattaatatttggtcccacctgtcatacatacattatatcttggagcccgtgctgcagctgactacagatatgtagcccgctgctcttctctcttcctttatctctttaaaatatgtttatagctggcttatagcctgctctaaggaaatagtactaactataatactatcacaaaataaactgtagaaatgaagttgggtttagacagctctacaaaccctattttagatctaactcataaaattaaatttaatagtttaagccctaccaaacaaattgcagttacacaaaaagaattttagaagcgatcgctacctaaatagcctgcgacctcatgaggccgacaaactgagcacaggtgacaacaatctatgactagtggaaaaaactagcaacacaccataacgttcccaacaaagagattcgaccctaattctcctaatctcttaggaaatatggaagaagcgggaccaaagaatcttccaaaacaaggagctatccctataaatcttattatgaaaattaaggagaagccaaatcttgggtattggcgggagccaaacaactaactaagatgttaccatagacgtctgccttatttgtaaatatttctttgttttctattttacatgtaaataacactcctatattcaatgaacaggcacgctgtgtctttcgtttttcttttttaaaaaaacacatgctaaacgacccataacgacggcattttttgcgagagtgggaggtggtcccacctcgagcgggcaagcaaagcagcaacgagaaaaggaatctggacgccaccccaccacaccaccactaccccccacttgcaatctcccctctctctccctttttaaaataaatccggataacgcatcggtgaaccctgcggattaacagagtaaactgcaacaaaccacgcgacccccaaacctctctctctctcctcgcctccgccgtcgccgtcgccgtcctcgactgctcctccggtgtgatccgatcacgcgcggcctctccgcctcccgctcgcccttctccgcttcgcgtgttgtactgttctcccgcggtcccgcccgagcagaggtaagaggaggaggaggtgggtgagagaccgcgtttgatccctgggccgaggcggcgcgggatcgggtgggggcgtggttggaggtgttgtttttgtttttcgggtggaatcagcttcgtgccgcgcgattgatggttgtttcgtgtgttgtggctgttattttttttttttaggtttgggttggccagcgagggaggttggctagggcagcgggctgatgagagaggcgtcaggcatgtccgggggagaagacgtccgcaaggtttctcgccaggacatacagctcgtgagcaccacaggaaccctgatccctaaccttttctctccccctcaattttttttgagcctaccttggttgtgcatgcgctgtgctgtttgtcccccttcttcacgacgattttcaagttatacgttatcattcagatgcaaggaataaccgaaacgcgtgttgtcgtagctaccatgttatcattcagatgcaaggaataaccgaaacgcatgttgtcatagctaccatgctatcattcagatgcaaggaataacagaaacgcatgttgtcgtagctaccatgctatcattcagatgcaaggaataaccgaaacgcatgttgtcgtagctacaatgctatcattcagatgcaaggaataaccgaaacgcatgttgtcgtatctaccatgttattaatcagatgcaaggaacaaccgaaatgcatgttgtcgttgctaccatgttgtcattcagatccaaggaataaccgaaacgcatgttgtcgtagctaccatgtttcctttatatgtatatttattagtaccttttatgcctttcataattgaatggattgacatggctggcaaatgtctgtgttgctttaatatgccctcatttgggcttttatgtactagggttagttcgttatttcagtatatgcgcgatcccgtgttggactttagttaaagatcatgtgctggagtcactgcaggacaaggttgtcggaaggagagagaaaggagagcaaaagagtttggggatgaagggaaaaggggaaagaaatttaaggaaaaacacgtggcccaatttattatttgaagctgaaaatctcataaagcagaattatgatgtctaacggcataattgaaaatttgaaactctttatgtgcgtttctttccttttcttcaagtcaaatgctgaataggcaaccgctcttgcttcaatatccaatgcttaaaaaagaacttctgaaaaaaaatcattgtagtgttcccttacctttccttttttaatatgcaagatatgctctcttttttttgtcggatgtcctttatcatttcttgtactttctcatttattttgactctgttaacacttttgtgtgaacatattggaaactctgtagttgtacttctctctgcatacttgaagcaataagtcctcatacaaaaattgttttacaggtccagaatcttattgaacgatgtcttcagctttatatgaaccagaaagaagtggttgagaccctatcattccaggcgaaaattgaacctagttttactgagcttggtaatacccttatacagattttctttttcttgttgtgcactgaatgtagcataactataacttggttgacttcccattgcatattgacatagcaatatagcattcatggtgcaccaagcctttgaatttttatgagccaatggttaatatcggacaggaatatgtgtgctttctaatacaatttggagggcattaatttcattccgtcgtaattcataaacaattggttctccgattgctgtttttaatggtaaaacacaaacacgtttgcctctatttctcactgttgtttttctccagtctggcagaaacttgaggaagagaatcgtgagttctttaaagcatattatgtgagacttatgcttaagaatcaaataatggtcttcaacaagctccttgaggatcagtatcggcttatgtgtaaagagcagccttctggagtaccttctatgcctcctactactaatggctccaacatgggcacatgtaagtatatgttgttttttttttcatcagctgtctatacaatgatgttaccttgcttactgttcaacaaatccctctaaactatttcattctaaattgatgctagaggttgtttaccctcttattcgggtaatatagctgttccgtctgtatatattaagacagtagtaaactagtagagtgatgtccgtttctttgtactagtgatacagtatgaagaatttatgggcttgccagtagtatatcttgggattaccatcgagtttagatgatttgcaagttgcaactttggtagtttggctctcctcaagatctaacatttcccgccttccaacgaaaatcataatatcatattaagttgattttaggccactttatgtttactagttactactgtgcttttagagttctctactggcagttttgttagatcagaacagtatttgagaaagtttgttccctagtcctgaatcctgatacatagcttattactaagtttgtaatttttgtgatgtccggaccaaattttattatgttctgacatagttcactgttgactctcagtgaatcaaaatgcatgctttttgccagacactactcccagcactgcaatgccagatagcttgctacccaatggaagttccagcggtattgtaaatggcactccatccagtgaccaatttatctatgctggtaaagtcattcatggtcttcctagcagtatggatgcttcatctagtctactggcagcacataactcaactgctgggaggtttaatggagacaatggaacaacaatcaagacagaagcaagctactcgggcaactctgattttggtttctgcaatgagagcgctttcctagaaccttgccagtcaattggggatgcctctggtggatccttcagcagctctgagctgaatggacagccactaggtgatccaattatggacatggattcatcatcttttggtttcttgagccaaattcctcggaatttcagtttttcagatttaactgaagactttagccaaagtgcaggtattattttctgtgatattaccttttttttttttagttttccttttcttcagcattgctgtttgctgtgtaatgtatacatacaccttttattttgggttgtctgcagaaatattggagaattatggcagatccccttttatcccttctgaaccaaataatttctcagagtctactcctggagaccatgcaggttaattatccccttccctccagttttctgtttcgttcttatccaccaccacagtacaccccacccccacaacatgtaaggcaagctagacaaggaaatattgacttgaacatacggcactgaggcattgatgtaacgctcaatctagctaatgtttctcttgctattgtcagaaataggaaatagacggctagataccatatccgagggtgttagttatgaagattttggaagcgattaatcagatattgatggtactgcttaaggtaatcaaactttaggcaaaatcacaactagacacatttccccttttcttccatttaattttctggtcttgcattggattggattgtgggggtttgtggcggaaaattaactctctaagtattcccgtgttgattggtatgcatatggcacttccatatttaagcggtaatttgtggaatgtcttcacatggctgtatgagaacattctgcagaagtctgccttggtgggattctgtctttcaggcccttgagtttacctgttgtttatcctaagcacaacaaaaaatgggtcgaagttattgcatcatgagacagttgatttgtgacagctaataaacagtgtttatcgaacactgttcttgcaccttagacattttgtccaccgtgagcttcctattcctcatgtgatgctgaagaagattgtagctggatgttagtccaatactccatccttaggcactcaactaggcatcagcatgcatactctactgttacatgggctcggtagttactagttgcattatttttcaacttaagagctagtctgagcatgaaaaactaaacagagaagtacataaatggaacggccagctgaataaagaaaattcatctgatgtattatcctttaggttgccacaatacactaactttagatggcacaaggattatttaatttaaaaacctgatgatggtgccatcagcctgtgaatatggtggtggtgtgtggcaaggggatgaagatggggggtttgcttagagcatgccctctctttttctattcttgaatagcaaaatagggtgttatctatatgctactggtttaactcttctaacttgattcatcgatctctatgtatgtgcaggttgagcagtgatgcataactttgtacatagtagtttgggcaagtgagtctatattcgtggccatggaactcagctaatttcatggaaactattgcttcgtcagttttaggtcttgttctgttggactaccagcttcggtgacttgtgtgagaatatttcatggcctaataatgtgtcgcattgactgatgcaagaaacctattgtccctgtgtcattgctgaagatattgtagaagttagcgttaatggtgactggaagctttacattgacatttcgtgctgttgcacttgatgtgtagtttgtacatgatgcttagttaacattttccctctgttgcacttgctgcggttggccatgtcgcgctctgcactcttcggttgttcagacatgagagtttacaataattcagtattggagaagttggtaaaactgtcagattgttgacgcttggtgaagtttgattctcaagatgtgtttgttacactaccgtctaccattacatgtttccattccctgaacacagaataaacagtgattgcaaatttgacatccaagcacaagatgattaagattctgttagcttctagtccaaagagagtgtgaactgagaacgggagatcgataagattgagtagaaaaaaaattagctttacgaaattcaaagttacgcgtatacaaaacctggacatgggcaaagaacatctccaatttacagtaattcagtaaacaacagatcacaaatctcacagaacaggacgaaacacatgagaaaaatagtctagttcttggggatgttcttgccgacgatcttggcaggagcgatgcggaggaggttcccgggcttccctggaacggcgcccttgatcatgacaactttcaggtcgttgtcgatcttgacgatcttgagcttcctgatcttggtcttggttcctcccatcctcccgggcatcttcttccccttgtacacccgacccggcgtcgtcccggcaccgatcgatcccagagctctgtggctcttggagccgtgggtcatcagccctcgcttgaagttgtgcctcttgatgccacctgtgtcgatgtccaagaaccgtcagtcgcaaattgagagcatagttgcacaattatgccatattgccattagatgatcaggaactaaaagagatattggtgctcttgacttcatgagaatgctataaacgattatgttgtttggggagaaacacccaggggtcttccaactagctccacaaggtggtaggctagacgacctgggttcgaagcctcacccattctaattatttgatattaggtccttctctaatatttgtgtcttttttattatgttgtttgggaagaatatacatgaaatggataatgtttgcggtattggcaaatcgttggtcgcagcaaatcaagagcgcaattgcaacgggtttacgatgttatattcacttcatgaaaattatacaagtgatgctgatggttgcaataaattgtgaactataacgaatgtgttgacatggtacaggtctgcaactccaagaacagcattgacattgccatattggcaatgccattgtgcaagtctaggacgctaatcaagagaagaggctaaatgattcttcccaagaacaattctgtacactaacattggtgagcatatggtaaatttgatacagcaaaatttcaagcttgttctcaagtcttcctcacaatgtaaagcattgttcaaattcagacagggcgaaatggtagtcacattgtgaaaagggagtaaaaaaaaataatcaagtttactgaccttggaaccccttgccgatggacttgccggagatgtcgacgaggtcgccctccttgaacatgtcggcgaagtcgagcggctggccggggtcgtacccgtcgacggactggaggcggaactcctgcaggtggcggagcggcggcgcgccggccttgccgaggtggccgagctccgggcgggtgagcttctcctcgcggacgccgtggtaccccacctgcacggcgtcgtacccgtcggtggccgccgtcttcacctgcgtcaccacgttgccgccctcccggaaccccacgacggtcaccggcaccggcttgccggtggccgggtcgaagtaggtcatcatcccgaccttggtcgccatcaccccgaccccggcctcgtacgacgcgcgcaccaccgccaccagcggccgccgccgcgccgccgccgcagccgcgccacctgcgccgctccaggaggcggcgcggcggcgcggcgcgaggaggcccagcgcgccgccgccgccgccgccgatgcccacggccgccatggccattcttggtgccccggattcgagcggggatttgctcactccagcagtgtcccggcttcgcttgctgctttggttgtttttcgtgttgaattcgattggattggggtttgcggctaatgcccccttatcctcccgcctgcagagaggcgctttttaggaatacgctttctttgccggggaggtggattccgtaacagttgcaaaataccacgggtgcataataaattacaggttaggctagacaggcggagctacctcctgggcaggtcgggcgaccgtacagactccgccgctgatgttgctactattctccattgatagcacatgtaaaaatttagggagtaactatatatatatttatagcgccgtatttttcaccaaaaaaatagtcggcatgtatttacattgcaagtccctaaattacatatataattttagtgtatttacaatgtaaattccaaaattacatatgtaagtactaaaattacatatgcaattctcaaaattacatgtgtaagttgatgtaattcccaaaactataaatttgtgatgacacggatatttagtttttaagactaattagtaatcctaattagcaaataacattaaaacaacagaagagatcagaagagaacagaatcggagggatatgcgtacactgcgatgatttctgcatccgcatctgacggttgaaacaaccgactgaaatccatcgtaatttgtagcgacatatttttagcaataccgaaaatttatggatcactagtaaacgttccttgtctcccaggtttaagtatgctgctagctttgccattgagaccatataactttaccgagttttattttagataacgtgctatccagtgtccttacttaaagtcaagtgtttttacctagatcaattgtaccttagcacggtgcccctgtgcaccaggtgggaagatatcaatgggaactgagtttggtacagatggtttgttttagtatataagtgggtttttgtaggttagccacttgcactctcgatgaccttcattgcactaacacagttcagaatagctcactacaaaatagtgattgaacacttcaaattctatcgaaccaataacgttgttcaagaattgaaagcaacgagagaaatccattgccttctacgcgagtgagattcaaaaacacaaatcttgcgctccatcactagtattttcacaattcacattttgctatatctttattgttttctatgcccttcgctctacctgatcacttatatataacaaaatattgctttacttagcatatgttcttctggagggattgaaaacccccttcgcatgcaaaacgaagcaacatactaacactgtcggagcttggggctcctcaccgggagaccgcgcaggcccccctttgccggttcggccgggggcgctaagtgaggttcttcaccctcgatctgtggaatattcgcgagagagcaaatgcacgagacacgggcgatgtagacaggttcgggccgctgaaaagcgtaataccctactcctgtgttctggtggatctgtgtgtgaaggagttacagagagctggagagcaagagagttcaggctctagaacccccttcctctttctctcctctacaagctcaagtattttcagagtcgtctcccctcctctctcttgcttcggtgggcaaggtcctccttttatatctcaaggggatcccacatgcaccacttctacctactcttcttttgggtggggacccaccctatcctgaccaaaacttggctcgcgtcttcgcctggaagctaaatcacagcttgtccttgagtgaggcccagcgccgtcactcgcctgacacaggggatacccctgtcatttcttcattaatgggtggagatttgcaatggatgctgtccgaatgaccctccgatgggatgggtcatacctacctccactccgccggaagcagatgcaacgtgggagcacggttgtctgccgatgacgtgaccggcgtcagactagtcacagaccggtcactcttgtccaccacgcgtcagtttagcatgccgcacgtctgcccttcttcatacaatgacttcctcgccatggttgcgatgaagcctggaatgaatctggccgggactgacataccaactctaggagttagcacgccggctccggctagggacgagtgcctggaggctctcattattccgacgggacggggcgaggcgtgtgacaggccgcctgttgccacctaacccgcaatctaaccggtctgtgaccggtcacacactgcgaccggtcacggaccggataagcgtgcgatgcgctgcattgaatgcggcgtggtgcgctcgtctaacccgctataaatgcggttaggtgagcgccgctgtgctcacctaacccatacacgtggcgccaacaccacaggaggtcggggcgccccagccctcggggccgaaacgggagcggcccgacccctcgaggagacagagggaggggtggccacgtcatcctcgggcccgacccccccgagggggtcaggccacgtggatgaccgcggctgcccaagcctctagtcacgatacccccggtcccatgtcaccgacaaacacctaattaaatattagcttaaacttaaaaaataaattaatataaattttacaggaacattttttatagaaaaatatttgcaaacacacactatttattagttcggaaaccgtacgcaaaagaaaggagcgagtgaaggttaggaccacagacttattctacgcttttaaaaggcatcttctatctttttatttttgcttgcttctgaagagggggaatttctagaactgttcggctgcactcattcaacgaagctgcaacacagtggttgcaccttgcagccgaacaggccctctaattatatataataagcttgtaaacttctcaaatacagccatacacaactactcaagccgagagagaatccaaaaattgctcaaatttgaaaattttggtcgtcagccatcaggctcgagccagactgcgaccctaagccgacctattagagcatctctaatagtctctccatcctactctctaagataaattttagccattctagccaaaaaaacgtgctccaacagcctctccaaccggatggctaagccatatggctggctaaaacccttcctccactagccaaatttggccactctatttggctggccaatggtgggccctacgtggctaatcaactccatccccacgcggcaacagagagacacgggaggagcacgacgacgagcacgctaccgacggcctccgctcgccaccgcaccaaacccgcacggcactgcccgccgcctccgctcgccgcgtctgccggcctccgcgcgatgaggctcggcgccgccgccgctcgctgttctccgccagtccgcagtagtccagtaggaggaagggaggaagaagtagtagtagaaaatgggttggaagaggaggaagaagagtaggagagactgacatatgggtcccatttgtaatggacttgtaatagagagggtagatgaagaggctgttgaagtaaacaaatagtattactagccaaatcagattgagagttggctatagaaatgtttagagaggctgttagagatgctcttatgccgcaaccgcaccaagccgcaaacgctccggttgagttggactcgtccgagccggatctgataacccacccgcgactcctaccccattcgagcaccacccgccccgccaccgcctccaatctaaaaccctagatctctctctctccccacttctctctcttctccccccgagtcttcctcacccgccgccgccgccgccgccggaggaggaggaggaggaggattccggtgcggccatgtacctctacagcctgacgctgcagcgggcgacgggcgcggtgtgcgccgtcatcggcagcttcagcgggcgcgactcgaagaagtcggcggcgtccgggtcgtcgtcgtcgtcgtcgtccacgcaggagatcgccgtggcccgtggcaccactctcgagctcctccgccccgacccggagaccggccgcctccgcacgctcctctccgtcgacgtcttcggcgccatccgctcgctcgcccagttccgcctcaccggcgccaccaaggactacctcgtcgtcggctccgactccggccgcctcgtcatcctcgagtactcccccgaccgcaaccgcctcgacaaggtccaccaggagaccttcggcaagtccggctgccgccgcatcgtccccggccagctcctcgccgtcgaccccaagggccgcgccctctgcatcgccgccctcgagaagcagaagctcgtctacgtcctcaaccgtgacgccgccgcgcgcctcaccatctcgtctcctctcgaggcgcacaagtccaacacgctcaccttctccctcactgccctcgactgcgggttcgacaaccctgtcttcgccgccattgagcttgagtacgccgagtccgaccgcgaccccaccgggcaggctgccgagcaggcgcagaagcacctcacattctatgagctagacctggggctcaatcatgtctcgcgcaaggcctccgagccgatagataacggtgctaatctactggtgactgtgcctggtggtggtgatgggccaagcgggctcctcgtgtgctgcgacaactttgtgctttaccggaaccaggggcacccggaagtgcgggctgtcattccacgccgcgctgatctcccggctgagcggggtgtcctcatagtcgcagccgccacgcacaggcagaagagcttgttcttcttcttactacagactgagtacggcgatatcttcaaggttgacctcgaacacagtaatgacactgttactgagctcaggatcaagtactttgacaccatacctgtgacatctgctatctgtgtgctgcgctcaggttttctctttgctgcttctgagtttggcaaccatgcactttatcagttccgtgatattgggcgggatgtggatgttgagtcgtcttcagctacactgatggagacagatgaggggttccagcccgtattctttcagccaagagcactcaagaacctgtaccggatcgatgaaattgaaagtctcatgccaatcatggacatgcgtgttgcaaatctatttgatgaggaaacaccacaggtattcacagcctgcggccgtggtcctcggtccaccttgcgcatcctgaggcctgggcttgccattagtgagatggctcgatcgatgttgccggctgagcctattgctgtctggactgtaaagaagaatatcaatgacatgtttgatgcctacattgtcgtgtcctttgccaatgttacacttgtgctctccatcggtgagactattgaggaagtcagcgacagccagtttctggataccactcactccctggcagtttctctccttggcgaggactctctcatgcaggtccacccgaacggcatcaggcacatcagggaagatggccgtgtgaatgagtggaggacacctgggaagaaaactatcactaaggttggatcaaaccggctccaggtggtaatcgccctcagtggtggagagcttatctactttgagatggacatgacaggtcagcttatggaagtcgagaagcaggacatgtctggtgatgttgcatgcctggccattgcgccagttccagaggggagacagaggtcccgattccttgcagttggttcctttgataacaccatccgaatactctccgtggaccctgatgactgcttgcagcctctgagtgtccaaagtgtctcttcagccccagagtccctcatgtttctagaagttcaggcatcagttggcggtgaggacggtgcggaccatccagccaaccttttcctcaatgctggcctgcaaaatggtgtcctgttccgcaccaatgttgacatggtcactggtcagttatctgacacacgatctcggttccttggcctgagacctccaaaactgtttccgtgcatagttagccaccggcaagcaatgctttgcctgtccagccgtccctggcttggctacatacatcaaggtcacttcctattgactccactgtcctgtgatacacttgaatctgctgcatccttctcttctgatcagtgctcagaaggtgttgttgccgttgctggtgatgccctacgaattttcaccattgaacacctgggggagactttcaatgaaacagccatccctctgcgctacaccccaagaaaatttgtgattcttccaaaaaagaaataccttgctgtcattgagagtgataaaggtgcgctcagcgcagaagagcgagaagcggctaagaaggagtgccttgaggctgctggtgttacagaaaatggtaatgcaaataatggggatcagatggagaatggtgatggtcaagaagatggtgctgaggacagaaacacacttccagatgaacagtatggttatccaaaggcggaatcagaaaggtgggtttcttgcatcaggattcttgatccaaagagcagagacacgacttgtctgcttgaattgcaagacaatgaagcagctgttagcatttgcactgtgaactttcatgataaggagcatggtactctcttggctgttggtactgccaagggattgcaattctggccaaagaggaacctttcagctgggttcatccacatatacaagtttgtagatgaagggaggtcacttgaactgcttcacaagacacaggtggaggaagtacctcttgccttgtgccagttccaaggacggttgcttgctggtgttggttcagtcctcaggttatatgatcttgggaagaggaagttgctcaggaagtgtgaaaacaaacttttcccaaggacgatagtgtctatccatacttaccgagataggatctatgttggtgatatgcaagaggtatgctcgctacctttgattggttctgttgctcccctgtttgtcattttgtcacctgtagatgtatatcagtttttttggtagtctgtatgccaaggtgtcttctagaagataaactagcaacttgtcttgtgtgcaacatgatattgatctaaccataggctacagacatgtttttggtgtctacactgggtgagaaggaaattttaaattttattagttactcacatttactggttcagattgaaatatgtggtttgagagcaagtaataggagacaaattacccagcatattttctagatcatgttttcatcatccatctccttttttctttgtttcatcttaaagttttttgtggatatatgaaatttagatatttttgcctgtcctatgaatagtactccaaaataacaataataatgggttttacagttagattgtcccttccaaaataacaacaataatgggttttacctacttctggttgaaacatctctaatttatgaattctctgacagttatgttgcagtttcatatttttaaatatagtatagtatacatataatattcaccatatttcatataccttttttgtttgacaaatttctaacatttctttgtggtgccatctcctgcagtcatttcattattgcaagtacagaagggatgaaaaccaactgtacatcttcgctgatgatagtgttcccaggtggctcacagcagcaaatcacatagattttgatactatggcaggggcagataagtttgggaacatatattttgctcgccttcctcaggatctctcagatgagattgaagaagacccaactggggggaagattaaatgggagcaagggaagttgaatggggccccaaacaaagtagaggagattgttcagtttcatgttggtgatgttgtcacatgtttgcagaaagcctctttaataccgggaggcggcgaatgtcttatttatgggactgtgatgggcagtgttggggcactgcttgcattcacctccagggaagatgttgacttcttttctcacttggagatgcatctccgccaggagcatccaccattatgtggaagagatcacatggcctacagatctgcttattttccagtgaaggtgatatattattttttttgtttagattagctagtatgtcaaccaacacagatattatcacaaatgcatatatttataacttttttaccactttgtcggatagaatatccaggtgtaaaggcagttggcagtatctgttttatgtttgatgatggagtttcgttttggtttgtttcaggatgtgattgatggtgacctctgtgagcagtttccatccctcccagctgatatgcaaaggaagattgccgatgaactcgacagaactcctggtgaaatcctgaagaagctggaggacattaggaacaaaattatctgaaagatcattgcgcatagcgaaagaactagacaaactgttgggctctcaatggctgtaaaaacagaatctcctttcctgtccgagacctagcagcttcagatccgtggcacattcaagaaataagaaaacactagggccaatcgagtggagaggtggtaaagtccttaatggtctgatttgtagaattcttggtgctaatgacctggtgtctggaattcgttgttaatggtctgatttgtatatttcttagttaacaatggctaagttgacctttcagatcgaagcgagaataggtcacataactgcatcagcatcagagtgttcttctgtaactcttagagcatgctttagcctttgtgttagtatttgctgtgatgtagttggacaagttctttgttttgatggttgactcatctgtaggctgctgctactttcatgatgtacgatagaaccttttcattttttcaggtgatactgaagcagatgtattggtgctatccaatttgattttcctgtgataatattacacttttgatgatgaaatattctactgctagtagttcaatggcatataaacaatttcatccatagattttattggctggtaaaccatatataagtgcgtctatgtacgaaaagcttaaccccccctattttcaccaatgggaacgggtgaaaagtttgacctattttcactacaagagaggtaaaacaggggagacgcatctatttggtgaaatataaaatctcagcgacagtaactttctactccctccgtcggagatcgacatggtctccaatgtggcaatggcaacaaatagtagtatctgtagggataaattatttcaaatgaaaagaattgtataccatgataatttgtaaaaagataaatctataacactattcttacatcatcaatctattgatgttcaaagttaaaaagtataactcgacactatttcaaaactagttatatttgtgaaaagagcgagtacatccagatgggtaaaatctcatcgtagtaacttcttttagtacaacacgatgtacatggcacacacttcactctcgtatttcctagaatatcacgtttgcacatccttcctaaaagggagtggattataaatttgttctttttttgaaaaaaaaacacgtttgtatgtcctttttatatgtgtaaataaagggacccataattataggtggttagaaaagggaacaaaatattatacttcctccgttttatattataagactttctagcattgcccatattcatatatatgttaataaatctagacatatatttgtgcctagattcattaacacctatataaatatgggcaatggtaaaaaatcttataacttgaagcggagggagaaggcctttagtgcgtgagaaacatatgttcgtactaaagaaagatactccgtatgaatgcgtttttgatacgtgtgaaagtgcatggatccatgattctactcaagatacgtgtgatacattctataatcgtaacgtcaccaatgcgtggagctggatgtgaataatctctcaagctggataaacattctataactaattacgtttaaatatcattaacataccacaggcaagcggaatctttaaccataatatcactaattagtggtaaacacatgaaaccaaagacatcctacaacatatctaaccaatacgtgcgacaaatgaaatattcaccaaaaatattctcccccctttccatcctgaattcctgatttcacgtaagtttgccactgctttataaggccatttacactacactaatgtggcattcagcccaagccgaccagttcaaagattctatgtcacatatacttctcttgtaaccaaaataggttacccattcctcgtcagagattgtcagggaggggagaggaaatcctcgctcggctaccttctcgagctagttcgttgcctccaacacggagttgggagagacgacgaccatagttgggagggacataccgggaggtcatcgtcaccgcccaatatgcatcgtcgagctccgccgccaccgctcagacccccaccaaccatcgccctcgctgccggcagatccattgagaagagggaggggagcggctcctgccaaatctactccgccggtgggagaagaagagcaaggggggttcgccgccatcccctccccgcaaaattcggtgccaccccgctaatgtcctgatcagttactactattaaactttaaagtctgcccattatttcccaaaatggaattgctgccgaaccccctggccggcaggcatgacgttttaaagtactacactctctccgtagtagcagcatatagcatctcttcttcacttcacagacatgcgaccctgcgggtgttacgctcctcgctcgcacaccacgaccaccgttcacaccacacgtgcgaaaaaaaaaggaacccgaccccgagtccctctccccaaatcctagccgttggatccccatcgcacgcgcgaaactccccccgcggctgatttttcaccgtcttccacagcggcggggcccgcggccgccacgccccccgggcccacacgtcagcgacacgcggcctcgcgttccacacacacccccggatccgcgccgatccgcgattggtcgacgacgtcttcccctcccctcctctccttccttcctccctctctctctctctctctctctctcttcaccgcgtcgctaatccccacctcgtttccacccccaaatcacaccgccgccgctgcagccgccgtcgccgcagcagctgctgtctctcccccgtgctagtgggggggcgcctcaccccgcgggtgtacggacgtgcccggagtgggggggaacgggagggggggtggggaggcttggtggtatcgggtggggcccgctcggtttctagggtttcggccgcgctgacacctcggggcctccaattcggcggcggggctccgcggtggggtggcttgctgctcccgattgccgcccgccggttctgatcgctgtgggtgttgctcttgctgctgctggtggtgctggtgctggtgctggtgttgtgctgtttatgctgaattgggttgggttcgcggtcggattcgtggaggggtagtttgcctctactgttgctgcgctctggggttggggttggagagagaggctgcttcttttggaggtgctgtaaggcgagtggcggtgcgctcgcttgctgtcgctgcgtcatccagccgtgctgcacggcgatgatttttatgctctgaggctcggctggcggcaaatatgaatgtgggacaagcggcgcacctgtccgggcagatgtcggggcaggcgccgcagactaatcaggttggtggcagtggcgtcggtggcgctgacggactgccacagcagatgcaggacgtggtgggacttgggggccttgatacccagtttttgttaatgcgcaacactatgcgcgataggatgtaagcattctattactgcggcttctttgtcgggggactatttattagtcagggtgttaattgtacggagttaatgtcgccactcttactggctgatccactgcatatctacaaaattaatgcaaggatgacgacttgctaaaattgcgctggacctatattacctgtactgccttttacgctgctgtagttatttgcttctcaaactgtaaagtggaggataattataggactactgttatcgcttttgcgtcgcggatacatgggggctctgggtttagtttgatccccatccatattaccacaatttaggccttctgctgatggtttgagtgcaataggaggtgaagatagattttttgatctgatacttgtttgtaaactggcagattcgaatatataggaaggaagcaatcatcgactgattggcggcgacggctgccagaacttgctaaacggctcgaggagatcttgtatagaaaattcttaaacaaggtattgctctctgtccccataatacttttgtgcctttggtttaaattctgtttcggggcaaaagtagatctaactgttatgttattctatctgtttgattctttttgttgttgttggagcaggccgattacctcaatatgatgaggggaccagttgagccacaattgcagtttgctattaagactttgagtgctcagaaccaacaaaatcaacaaaaccaacaaatgccaaggcaaatggcatcttcctctggctatggcacgatgattccaacaccgggcatcacacaaagtgcaactggaaattctagaatgccctatgtaactgacaacactggccttccgtcatctggtgcaaccatggttcctcagggtgccaacactggtacctcacttccaggttcttattgttccactcagcttgtgctcatgcttttaggactgattgccttactttgtagtcttctatatccgtgctgtaggaattctagcatagaatgctaacagcaaccagcgactgccaaatatgtttgaaatttactaccccccttccactagactgtagttatatccatatgacagttggagcatgctctccaagctttctgttgttttgaactgaatatattacaggagtgagaaactaatgctgacctggtgtcaaacaggcgctctgtatactttgacttttttattgattgtccatttccacatgtgcttacttttatttgtccatacaggttcaatgtctaacggttaccagcatctaactaccagtgttccattaaattcaaccacaagcagcatcccatctacgatgggtcctgtgggtattcagcggcaagtgactcatatgatccccactccaggatttaataatcaacagaatgtgcctgtgaatcctgatttttcaaatggagctggatatttcaatggtgagccaactgtgacatcacaaatgcaacagcagaagcaatttcctagcaaccaaaacagtcatcaaatccagcatattggggggcacagtaattctggaatgcattcaaacatgctggagaattcttctgcatatggtttatcagatggacatgtgaatggtggaatgggtgtacatgggtcaaacatgcagctaacaaacagaagtgctgcatcagaagcatacattaacatatccacatatggaaattcacctaagcctgtgcaacaacaattcaaccagcaccctccacagaggataccgagtatgtcttcttttgattcacactgtcttctattcactttgttggaacttggaatgttcttcattagtttgggaagtgggaacaacacataattcataactcttgttttggttctttgttattagagtcaatggccttcatgttgttgtggttagagtccttgtgcccgagaatgaaatgatactgttgcaacattaaaacaattgccactagtttggatgtctgtatttagtatctattctttattagtgtcatattcattctgcaggcatgccaagaaagattttgtaagtttctgcagcctttatacactatatttttaactttttgaccacttaatgcagatagaagctcctaaacaataaggcagttttctatgcaacaaatttgaatatactgatgatttaagatcgtcattagttcagatttttaccatattttttaatcactaatagcgacaatgaggtgcttcacaattcactacagaaggctttaatatttattaggcacatatgcgtagcttacttttcctcgttcattacacccatttgatctgcacctggggaggtactgctttatttgttagtttagcatgcatggtagaagttgattgatattcatgtgtttcttttttttacaaaacagaactcatacgtgttcatcacattgtgacaaaggatgattgtgttgttttttgtgtgcagcaccagttgatatatctggttctgggaatttttacaatactggttcttctgctttaacagcagcgaataatcatagcatgggtgctacaaatttgccatctagatcaagaatgaattccatgttgcacacaaatcagttaaacatgcaatccattcaaccgcaacctcagataaaaactgaggttttggatcagccagaaaagatgaattttcaatcttctcagttgactcacgaacaacttatccgccagcaacattcaatgcagcaacatcaaatgcagcctagttcccagtttgtgcaaaaccagtaccatctgaatcaacagcagcctaactcacagcatcagcagtctatactgagaagcaattcccttaaacagccccaactgagttccagccattctatgcaattgtcagaacaaggagctctgccacacactgagctgatatcttcacaagctactgaacacgctgacattccaatttaccagggtcaataccagcaaagaagtgctcatgataatgtcaaaggagggcaagtgtttggacatctttccagctctcaaaattttcattctaatgcgtcccatgattctcagcaattgttgccaactaatcagcagcttgatgacagttcaaatgatgtaagttatgtcttgaaaggatctcagccagagcagatgcatcaggctcaatggcggcctcagacaatggaaaaagctcctgtcactaatgattcgtctcttgagaagcaaatacaggcagatttgtgtcagagaacaatgtctcaggatggagcacaacagccattttcatctgattggcgccttcctggttgtactgtgactccagctgatcctgcattgccaaagctccctagtggaggacttgaacaggctgctggaaatatctattattttcgtcagatgaagtggttacttttgctatttcatgcaaaatcatgcttaactcctgtcggaagttgtaaattccatcgctgttttcaggtacaggagctagtaaagcattttgagaactgtaaaaggaaagattgttcatacagggattgcaggaggtcaagaatggttactgaacattataaggcttgtgtcgatttgcagtgtcctgtatgcagtaatgcaaagaaacttctgcagcgttcagctgaactagcaagcaagcaaaagccccctgagcctagaaaaattgctcaacagaatacggctcaaagaatcatgaatggggtagagggtgacataatggacatcgacctagtgtcagatgaaatctttgatagtcagccttctgttccaaaacgcttaaagatgcagcctgtatcacccagtactgcagagcgtgaagtttctatgccctccaatgcagggcttatattgcaggaaacacattctgaactgcctgaccagaataacaaggtgggacaactgaaaatggatgtgaagattgacccacgaccactgcagaagcctgcaaagattggttatggtactgatggaaatgtgcccacagcgagacataatgtggcacctggaggctcaaatgagatcaagactcatgtcaagcaagaaatcatgccaattgacaaagagacaagtgagactgcccctgaagttaagaatgaagcaaatgattcaacagacatcacagtttctaaatcagggaaaccaaagataaaaggtgtctcaatgactgaattgttcaccccagaacaaattcaggaacatatcaatagtctaaggctgtgggttggtcaggtatgtgttcattttttttaataaaaaaatttattcataaccatttcagtagctatctaggttttcttgggagtgaaaaaagtgcagattaatttaaagtaaatagataggagtagtagaggacaaacactttttgatatgacatgacgcaaattgtgctatcataccccatttgggcatgcaaacaaggggcaaaaaaactagttcatttgtttttccagtgaatgaaaattcttcacctttgttactacttcaaatataatatgcaaagacaagggaaaaaatatttcatttgtttctccagctaatgagaattgtttccctttctcactactgcatcgaatatattactactagttactgtattagcttatatagtatttagcaggctaaagctttgccgagctctaaagcactgattgaattgaactgtatagaacaaaatgaaattttttcattgtcttcattagagacatgctggcattttgtaaggtactgtttttatgctcttgttatataattgtcatgatgaattactgccttgtcatctgacagagtaaagctaaagctgaaaagaatcagttgatggggcataatgaaaatgagaattcatgccagctctgcaaagtggaaaaacttacttttgaacccccaccaatatattgctccccttgtggtgctcggataaagcgaaatgcaccatactataccgttggtactggtgatactcgccattttttctgtattccatgctacaatgagtcccgtggtgacactattgaggttgaagggcaaaactttttgaaggccagattcgagaaaaaaaggaatgacgaggaaactgaagaatgggtaagttcctttttcatttttggtgattttgtgtctgtatcatcaaaatttgggtatcttccttttgtatattaaatctttttaaatgatgtattctgcagtgggttcagtgtgacaagtgtgaatgctggcagcaccagatatgtgctctatttaatggtagaaggaatgatggagggcaagcagagtacacctgcccaaattgttatgttgaagaggtgaaacgtgggttgcgtatgcctctaccacagagtgcagttcttggggcaaaagatctgcctagaactgtactaagcgatcatattgaagatcggctttttaaacggttgaagcaggagagacaggatagggcagctcaggagaggaaaagcattgaggaggttagttaaattaagtcatatttgtgaagtgaattttgttctctatttgttgctctaaatgtctttagattcgatcacagtgcacttcgctattacgcaactatgcattacatttttttttaaaaaaaaaattgtgctgcacggaagcatttttttataagtgccttcacagcgcatgaataatttgattgttccagccaatgttttatatcctaatttgaaatatatactgtttccaactaaattgtgaatcgtttctctcaatttcaactgattttttctgtagatattgatttcgaacaacatacatcatcaggcacttaccaaataatgcaaaaacagcccaaaacagcaaatgccaatcatgagttttgtcctaacactgaactcctacctgctatatagttaggtactattttggagtattaacctgtacaataatgatatattgtatgagttacctacagattgggaggtggtacttaaatgacatcttgctggcataataaactgaagcataccaaattaaattccattagtagtttggaatgtgttagttatattatcatattttgcaaacttatttaaacttattgttgaagactaactgaacaaccaaaaagtgtaaactacagggacaacataaaaaatatacaagaagcatatttcttttttaaaaacgtttagagtgtgtgtatgagattcacttctgcctgatttgtcagtttgaataaaatgcataataaagagcacaaagaaggtctaaatttaaatatcgaacattgcgaggattaagttttatacttctgtgagtatagtgttttgccatttcttttttatcttaccaaatttgacattgaatactgtgatgctttatgtgctaattctttctgcatagctgtgttaaatcgttaacatcatgagtttatcttgtgtgtgtatttgtgaagtaggcatgacttctctcctgtaattgagaatagaccactgacttttgccgtcatgaaggaaattattctcatcacttttaaattctatttattccttatttgttaggttcctggagccgaaggtcttgtggttagagttgtttcatcagtggacaagaagctggaagtaaaaccacgttttttggaaatttttcaagaagataactacccgacagagttcccatacaagtccaaggtaagaaattagtccagtattctttcaaaagaacaccaatcatttcaagcataaatcatacgtgaaactgttttttatcaaatgtttggcaggctgtccttttgttccagaaaatagaaggtgtagaagtgtgcctatttggaatgtatgttcaagaatttggtgcagaatgctcctacccgaaccagcgtcgtgtttatttgtcatacctggattctgttaaatacttcaggcctgagattagaacggtgtctggagaggcgttacgtacatttgtttatcatgaaattctggtaatgttctatgtttgctgagtttttctaaatttaaatgcgttgttttgccaggctggtcatactatttttgtatgcaactctttgggggggattctgccttcctccttaggctagcgtttttctgcactatctaatgctaggtctctatgtgttcagataggatatcttgaatattgcaagcagcgtggattcacaagctgttacatatgggcgtgcccacctttaaaaggtgaagattacattttgtactgccatcctgagattcagaagactccaaaatccgacaaattgagggagtggtaagacctttgttgacacttctgttactctgctcacttttagctcttctagtttacatgatttctgatgtactttacactcaggtacttatctatgcttcgaaaagctaccaaggaggagattgttgttgagctgacaaatctatatgaccatttcttcattactatgggggagtgcaaggctaaagtgactgcttctcgtttgccttactttgatggagattattggccaggagctgcagaagatatgatcaatcaacttcgtcaagaagaagatgaccggaagcagcagaagaagggcaagacaaagaagattattacaaaaagagctcttaaagctgctggccacaccgatctcagtgggaatgcttccaaggatgctatgctgatgcacaaggtaggattgtacagtggtttgcgtgctccttattttgatagatcacatggctgctagcactctacccctctttccctttctatcatccttgctcagtatttgtttttttcactttactggatggcatctttaccatgaacttgatttgttatgtgcagcttggggaaaccatttatccaatgaaggaagatttcattatggttcatttgcagtattcgtgtagtcactgttgtacccttatggtgtctggaaaacgttgggtttgccatcaatgcagaagcttttacatatgcgacaagtaagttattttctttaacaatattacacacgtgttattgatctatatgaggccacagtctgaagacatctgtgacatgccaaacaaatctataccagtattatttcacatggtcatgtttaatatggtgcccagcgaggagagttgactcatcaactggaaaattattcatcgaagaacagcagttcaagtaccacaatagactacacaaaaatttatccttgcccctcattattgaacccacagaagatcacaggtctttttgttgcatcaagttccttgtagaaaacaacaataccagcctttagtcccaagcaagttgaggggcaataagctcccagcaaaccagaaatactgaaaggcagatgtgctactctgtcctcaacatctgcataaactttgctaaggccatgactccccactttggtatagtagtcatatatcaagctatctcctcttttcatccccttgatcttggcaagcctctgaatgagcattgctgtctcatcaagcatgcacggatttagtcaatggtgaagttgacaccctatgcccaaagggttgctagtgaccctgttagtgccccgcctccaataattgatctccccatgtgccctccctgcaaactggggtgacacgtagaaagcccagacacgctcctaatcctctttaggcaagccaaggtgcccggatgtctgaccctacgagactagatgatttataataaatactttggaaaaagattgttgtctttagacagactttcgagctagatgatttttttgggggttctggtgaagtcattttgtcacattgagcattttgtttcaggtgttacgatgcagaacaacagcttgaagatagggagaggcacccaagtaacagtagagacacacatacgctccatccggtaactgactgaacttatattctcttcttgttgagaaaaggagcaaatagtaactaacgtataacttgatccttccatactttaggttgacattgttgggttgcccaaagataccaaggatagagatgatattctggaaagtgaattttttgacaccaggcaggccttccttagtctctgtcaaggaaatcattatcagtacgatacccttcgccgtgctaagcactcatcgatgatggtgttgtaccatctacataatccaaccgcaccagcgtttgtcactacatgcaacgtctgctgtcatgatattgaaactggtcagggttggcggtgtgaagtctgtccagattttgatgtatgcaattcttgttaccaaaaaggagcagtcaatcatgctcacaagttaacaaaccatccatcagctgctgatcgtgatgcccaaaataaggaagctcggcaaatgcgtgtccagcaggcaagttcttttaaatgttacccttagtgatcttcttcggacattgtcaaagatttttttttcctctttagttgaataaaaatatgcacttcgtgctaaaaaacatgacaactgtcgaacttaaattccatttataaatttatggtaaaccatatgataccattagcatggtaaatagcccacatagagaggataatatcaccttatggttatatcattattttaatttgcatccttttgtggaaaaactcaattctgtcattgtgttccattttctagaaacccttcaggatatagtatcacctaatgtgatgtttctttcatgacgctgcagctaaggaagatgcttgatcttctggtacatgcctcgacatgccgctctggcagttgtcaatacccaaactgccggaaagtcaagggactgtttcgtcatgggatgcagtgcaaaacacgtgcttcaggagggtgtgttctttgcaagaaaatgtggtacatgctccagctccatgcccgagcttgcagggactcaggatgcaacgtgccgagatgcaggtgtgttggtgcttctcacttttgttccgtcaccttgccttgtgcttgatctggaataacaccctgaccacttacggaaactatacactatgcagggatctcaaggagcatcttcgaaggttgcaacagcaatctgattctaggaggagggctgctgtaaatgaaatgatgagacagagagcagcagaagttgctgcaaacgagtagtggcatctgtacagctatatactgtggaaagaagatagggagcgcgcagtgtcgctgccctcgctcattcccactcccaagtagaagcttgggatatggttgaattagaggatctagctaagaagttgtctcagatggattcgtcccatgaaactgtcctggagatgcaagacgtcgcgcattcttccgccagttgttaacctatggcttggaagcctgcctctgcctcctcttcttcaaaggaaagaaatgaaatggatgaaaggggtgtaccacaataggtggtaactactgtgttctgtgctaactagttgcaccctgctgacggtgcccggtgaaatcgtcgtcgtcgataggacccccagcccttgggtgtggtgattcttttatttgacctcctgtactagtggaactaatcttgttttgctgcttgcctcctcttcatgtataataggtttctggaactcttattgttgatgaaaaattggtctagctgttccccctccagcaccttgttgttgttgttgcctccatcaggagtgagaggggtatagggaagaaaaaaggaagaagaagagggttgggcattggatatgaattgtttatttctgccccccattttgtaggaaccaatctttgttttaaagtataaaagcatagcatatcctgcattctgttgtatcattaacattacatctcctgcatttcttcttgtttcccctctgttgcatttcagctggctatttctgtgcaatattttctctctggaaatttatgttttatagtactatccgtcctagaaaataatgattttttttgacacggatattaagaaactccatctacttttgaaggcaatatttctaaatctgaaaattttacttttgatgggcatatttcaatccaaccagatatcttcttaatgactttctcggatttaatatgtaactatccattctttcacacaagattggcattattccacacaagattggctacatgctcatggagaaatgtaaatattaaggcaaatgaatcgtttatttacgatgaataactagtaacatgtttaaatgaatgataagtagaattacttatccttggtcattgtgctaagatgaaatataactatcaaaagtagatggagtgaacatgaaggttgtgattgtacgagggaaaaattaaatggtcgacaattatgattggttagaaaaataacgttcgtggacaaataaagaccaatgttgttatactccattacggaacggattgagcaagtttttttttggaatttcacctatataagtgtgtcctgcttctgttgtgccactgccagtaacatgtgcacccctacattaattgctgtgtttcctcccctactattatactctggtcactgtaaactgtgcgcattgagatttaaccaaaatttcgaaattcgcttgaatatcctatcagttcgaattttgataccaaaggcctcatgtttgaattacgatgagctcaaagcctcgaatccataacttcaagcccgaaccctgaaatcctggccgtccatttgttaatcgggcggttggcaaacaccctgcttgctgttctatccgcgccttgcccgccgtcgcgtgtggctctcgcctcgacgaccatggcgatgttcgcgcggcgcctcctcgtcttccacctccgcccgcccgcgcatcccctcgcagccgccattgccgctccccaccgccgccgcaagcacgacgccgtcgcgtgcagagccgctgcggggaaggggacgagcaaggccagggcgagggacaaggacggcagtaagcggcagcagaggcgggcgctggaggagcacctcaagcggcgcacgcgctccggcgccgccttcgacgccggcctctaccggcggcactcccacgcggagcacgtccccgtcatgctcggcgaggtcctcgccgcgttccgccgccctctcccgctccgctccttcgtcgactgcaccctcggcgcggccggccactcgctcgccgtcagtagtagttccccctcctgttctcccttacaattccagttacctttacattgctcgccgacgatagctgctcgacgaaatgctgcttcttcttcttggctctttagtgttatccgttgtgtgatcgttgatgcgcaccagctgtttgatagaatgcctattcggcttgtgcaatagatgatggaggcacacccggagatggaactgtacattgggatggatgtcgatccctctgcgctggagattggccggagccgtatcgaggccttccttgccaatagggaaactaatggagatgacgaagatgcctcgcagggaacactgcgtgcatacactcacgccaagaatttcaagtacatcaagcatgttcttggcagcgtggatgagaacattgctgttggaacgtctggagttgatggaatcctcattgaccttggcatgtcatccatgcaggtcaggtgttccgtaaaacgcagtgaaattgatggtaagcctcctttatttcccatttagtcatctgaatgccctgttgtactatccacaggtgaacagatcagacaggggatttagcgttcttcaggatgggccacttgacatgcgcatggatcctaaggtcagtgttgctttgctctagtttactgcccattccttccttccacttgcatacgaaaatgcattgccacaaaattttcttctagttgaagggctatgaacattgattgacaaaactacagtcttacatcttcatcttgttaaagtctagttttgctggagcttggaaaacatgatcccaaaacatttttatgcataatgcattcatattgcaatgcaaacttgtataaaatctttccagaaatttctaaaacattgaatcacactccagtccattttatttggatctgtcttgactgtagttacacttgtgttgacaattggtatttcactttttgcaaacaatgttaacccagtaaattaatacattatattacttgaagtgcaacacatccttaccaatggcctgttcttttccatatgaataaactaccgttagatttgccatgtccaaaaatttcaaaagaacgtagatttagtgccactttatcatttgcagtaatccataatcaactagcaaagtgacaaagccccaaaatagcacataatcttaatcttggttgccttgaaatctttgtactacacctaacctatatatgagattagacaggcaactttgaaagcagaagatatcttgaattcttggcctgatcttgaagttgggcgtatcctgcgtgattatggtgaggaaagtaattggcagtcccttcagaagcggattgttaaagcccgggctatggggggtttgcactcgacaggggagcttgtcaaacttatccaaagaacgtgtaccagttcagggggtatgtatgatgatggtatctctaaatgtggttatatgatttgtgtatgtatgacctgatgttttatgacaaacttataaactgcaggaaggcaaggttggattaagactgcaacaagggtgtttcaggccctaagaatcgcagttaatgatgaactccgaactctagaagatgcacttcatgcatgctttgattgcctagcaacagatggtcgccttgcagtaatctcattccacagtttggaggatagaatagtgaagcagacctttctggaacttattcatgaagatgaaatagatgatgatgaagacgacttggtgagtgctgacattgatagtgaagatgaaccctggtttaagcagagagtgcaaggaaagaatggaaccattctaacgaaaagaccaatatctccttcacaagaggaggaagaactgaatcagaggtgcagaagtgccaagctcagagttattcagaaggcgtgaacctggattaatcatatgatgactaaattctgagctctgaggagcagtgaggacatccatgcgtgaactcatataacatgtgaatgatcgcgcttgcagttgcaacaataataactggaaaaactagctcgagaggatgaaatggccatcctgtttctgcagttaacttagagagtagagcttaggtaagtccaaaaattaatctcactatttgcaccaccattttgtaccccattcatgtacactaaactctctaacaatagtttttactgcatctcttcttgttttttttttttggttatgcaggaagcctctgattaaattgcatattttaccagctaattaaacatatgatggttgtttgacttgggatttcttgctcatatcaattgtacttgtttacactcaagcagggtagggaaccaccacaaaataagtcaagttcagataaaaccaaaacatgcatattcagaatccaacgttggtgctcatcttgttcttggcagagatatggctacaaccttttcgtggctcacattgtcacccaatagttgatagtacaattaaagatcacctaaatttaagtcatttacttctcatatttcatattataagttgctttgacttttttctaatcaaattttaagtttaactaaattcataaaaagaatatagcaacatttcctacataaaataaacatattatcaaaatgtattaaaagttaattgtaatgaaaataagtttgtattgtaagtaatgctattttttaaaaaatttggtcgaactcaaaaagtttaacttagaatatattataatccgctttaacttttatctaagttaaaactctataagtttaactaaatttataaaaaaaatatcaattcttataacactaaattagttcattaaatctaatattgaatatattctaataatacatttatttggtgttgagaatattgaaggatttttctttaaatttaattaaatttaaagaagtttgattaaaaaaaaaaaaaggttaaaatgtcacgcggacgtacgcaggcaagccagcgacgagtccgtagccaccagcgagagcggtgaatccggcggagccacgtcgccggcgccgccgatcgccaagcccacaagccgccacgtcaccctctcctcctccgcgccacattttctttaaattatttttctccaactcttaaatcgtaccatgagtcactgcagcgtgggccccacctgctcttctgacaaccacatccacaagcaccagcagccgcgagattttcttttcttccatatataagcagtgaagcagcgcacacgagcagccaagaatctctctctcgcgcgcggatcgcctcgaattcgcgagctcgcggaaatggcggccatgtcgtcgcgctgtgcggcttcctcgtcctcatccgcgttcctcagagctccgcttcccggcggcaggcaccaccagggctcttgcggcttcgtcgccgccggcggcggtgctaagacgacggtgagggttgcggcggcgctcgacacggaggccacggcgaaggctggcaagtcgtcctcccgggcgcggcgggcgaggaaggacggcggcgagcccggtggctcctcctccaccgcgctgcttgctcctacccatcccgacggcggcggcggcggcggcgtggcgctcgacgacgtgatcgtgaacccggtggggctggggcggcggtcccggcagatcttcgacgaggtgtggcgcaagttctcgcggctcgggcagatgtcgacggtggcgtcgccggagcaggaggagcaggagggcgtcctcttccgcggcggcggcccgatgtgcgacttcgccgtccccggcgcgcaggacaccaccgtcctcgtcgtcggcgccaccagccgcatcggccgcatcgtcgtccgcaagctcatgctccgtggctacaacgtcaaggtcacttacttttacctcttctttcttgtcaagctttctcatgtcaaatcaacaaattttgatcaagggtgtgtttagatctttgggggtaaagcttttaaagtatactgacacatatttgaagtattaaacgtagactaataacaaaacattacagagtccatctgtagactgcaagataatcttattaaggctaattaatccgtcattagcaaatgtttacggtaacatcacattgtcaaattatggcgtaattaggctcaaaagattcgtcttgcaatttatctatgttattttttttttgaaacaggctctggtcagaaggaatgatcaagaagtgatcgacatgcttccaagatctgtggacattgtggttggtgatgttggcgatgcttcttcagttcaagctgccgtgtcaggctgcaacaaggtaatctactgcgcaactgcacggtcaacgattaccggtgatctcaacagagttgataaccaaggcgtgaggaatgtcaccaaggccttccaggtagttcttgtgaaaaatctttgaagaaacatgcaaatcaatcttatttagatttctgatatgtttactgaactgtgatttactttgcaattcaggattactacaatcagttggctcagtcaagggctggtaaaagcagcaagagcaaactgtcgattgccaagttcaaatctgccaaatctcttcaaggatgggaagtgaatcagggatcatactttcaggatatttatccttctagattcgatgaaggcaccgatgcatcgtttgaaatatctgaaaatggacaggctgttttctcaggtatcacctgatatgaaagctattacatcatgatctctgaattgtacactatagtgagattgccttttttaaaaaagtattcagatatattgcttcagttgatgatttttcatttgtttttaattctcttatcaaaattttctgtgattagggtttgttttcacaagaggtggatatgttgaagtgtcgaaacggctttcgctcccactaggttccaccctagacaggtgtgataagattcttcagtttattttttcttaataagtttgcctgatgttgcaaaatcatgacatgatctgttctttgttatgctgccatgttctacctgaagatacgacggcttacttctatccgtgggtggaaatggaagatcatatgttatcatccttgagactggtccactagctgacacctcacagagcaagaaatattttgctcggatgaacactaaagtagggttttgcagggtaagtggcaagtgatgatcccacttcactaaattacctgtttctgcattgctaatcggagtgatcagttaactaaatgctgaaaatattcttgttctgttcaggtgagagtgccgttctcagatttcaggccagtgaacccacaggaccctcctcttgacccttttcttgtgcacacattaaccataaggtttgaacccaaaaaacaggtcagtgcaaaatgatttgttgaatcaattggagataggcaatgcttctggaagttgttagtttaccaataaaatccttgtgcagagacctggtgactcgtctcaaggagctagtgacccaagaaatttccagcttataatggaatttataaaagctctacctgtaagtaattcacctgattctatcaattgatctgccatttaaatttccaatgttgcagatatttaccggaaatttcatttgttttttgcagactggtcaagaaacagacattgttttggtttcatgcacaggctctggaatcgaacctaacagaagagaacaagtcctcaaagcaaagaaggtatcacttctcataaccacacatcaaatgcaaactgttcttgatgcactcttgatacaaacattaaccagtttattatctctctaggctggagaggatgcactgaggagatccggcctcggatatacaattgtatgcccaggtcctctgcaggtacaacatctgaatgaattggattgtctttttttttcttttcctaaatgtatattttcagcaccagttgtttctcatgtagtgcattgcatattgatattgctgctgaatttcagtacaagctgtagctacataaaccttagtgtcaaaccgatgaaactaaatattcatcaagcaagcagccaagatttaagcatgcaagttgatcactaatcatagaattgagtgtgaaatttgagtataaattatgcttatttccaagccccaaatatactttcttcagtccatactacagtatagtataacatagtatcccttcttcattccaggaagaacctggcggtcagcgtgctctgatctttgatcaagggaacagaatctctcaggtgacatagcattcactgcgtgcaattatgcctgatataattgcatgttcaatgttagtatacatgctaaccattaggcttttcaactgaaatataaatgcagggtatcagctgtgccgacgtagcagatatctgtgtcaaggcattgcacgattcaacagcaagaaacaaaagctttgatgtaaggaaaaaaaaaaccttgtattgtgaactggccatttgtgcaacaggtagtgaaatgactaaccaggacaccaacctgatttgtgtaggtgtgctatgaacatgtctcaaagcaaggggatgagttgtatgaacttgtaagccccaaaactgaaacttcagtagattcatctttgtacagcaattcgcaaaatttcttctctgatctgtctgtgttttgcacttttgctaatgatctgtcgaattgttttcaggtggctcatttgcctgacaaggcgaacaattacctggcaccagctctctctgttcttgagaagaacacctgattgatcaaatgatcagtgacccatcaaattttatgtcattctgggtcagattattgtccatgtgtatatgattcatcttgtaaaggttttccttttctcatagaaaccgtgtggagtccacttgtgccatgatgaccgtctccagcacaaaagtgaaggagttgttgacaaaaaaaatccatggtcctactactttcccatctctgtaaaacttgtagaattttcataacaattgggcatgaattagggtgtgtttagttcacactaaaattgaaagtttggttgaaattagaacaatgtgacggaaaagttggaagtttgtgtatgtaggaaagttttaatgtgatgaaaaagttggaagtttgaagaaaaaatttgtaactaaactcggccttaggcccatcctatatagcaattttgagaactttgaagaagtaatgagcatgaggaaagtgcatttgtctaagaagtgaatatctcccaatttgtgtacatttgtatcgtttcttcaattttgtcacgctcaagaagctatgagtatgaattttagaatttaattctatgattaattaagggatgttcttcgtcacttttgttgcctagttctgtgataataatgctatcaaaacaagtaaaactcaacctaaaatttttttgaagtcaaactttattaggcataccaacttaagtttctttttcttgtttccatagcaaagccaaagggagtctaaatttacacctccatcgttgaaacattggcagtggctttgctaggcatgccaactcacgtatcaccctctggtaccacctttgtcatgccaactcatatttctttctctaactcgtgtttaggctcattttgatctgtatgagaaaaacctcgaaaatttagaggattttaatcctattgaaaaagtttctaagggtgtgttctatagtacaatttttcaacttctacttcctcaaatattgcgcgtacgcttcccgaagtgctaaatagtgcatgttttgtaaaaaaaatctatacaaaagttgattgaatgtatttttagctaatatttaattaaccatacgttaccatttatgtgacagaagtgttttcaatccttcttaccgaacctcagataagaagccctttgaaaaaaaagatagaaaaagattgaaccatatcaagtctatctctctcatcttttttttttgttttttcctatggtatattcaaacgacttatattttgcatttacatttgtatgaaaatactatgcttttatattcctttttttttcttaatccttcaattcaaaggatcccttaaatttaacatattatttaaaaaacagaatggagatatgttatactataaggacccacatgaaaagccatccaagtatttcattatacaccactcttcattagtactccatccatccattctaaaatataaatatttgaacttctttagaaaagattaaagttgagagaaaacgattttatttttagccacatctttgatcaaattctgaattttgaactagttagattctttctccaaccttctgattggtcgaaaaaatactgagattttggaactgctctcagccggccaggcaagtgttaccaaaagataaaacacggaaaggaaagaaaaaacccagagatgcgccctgccaggtcagctttccgccgcagtctgcccctctgccaccgggccccaccccccacccctgccacaggttactgcctctctctgaccccattgaccaactccgttgaccagtcaaacctctctctccctttcacattttcacccgcctctcgccgctgccgtcctcgctatgaaatgaaatgaaaccaccaccaccaacgacttcctcctccacccgcttcgtcttcgtcttcttcctcctccacctccacttgatcccagcatccgcatccgcagctgcagcagcagcggcgaggtggaggtagctagatccgtgggaggtggtggttgtggtggtgagggggagatgaggggggaggcgaacggggaggaggagcagcagccgccgcggcggaatcatctgcgggacgacgcggaggaggaggaggaggtggagcggagggcggcgaggccggtttccggtcagcagcagcagcagcagcggcggcgaccgacggatgtggggggaggggcggcgatgaggagcgtggggtacgtcgggaagcaccgcctctccgccgccatcgcccgcctcgaccaggagctccagtcgctgcaggtcagcgccacccccctccctcctcttcctctcatctcccatgaacttgattctccgtgtgcttattgcttatcaagcactagtatgtgtgcctttactgtctctgtgctgtggcctgtggatgtgtagcgagtcagcagttcaagctgtggcgcgatctagatcttgagaaaatccagaaaccgaagttttttttttccgttctatcaatgccttcttggcttcttctgttgcgtatgcatgtactgatgtatgtgtacaatcagtacatgcaaagggaaacaaaagagttcttcctttatccacagcttttgttcttacattgaaaaattatgaaagcgttgaaccaaatcacccagactactagacttatagtgctttaaaattaggagtttgtcctaatttgttttttttacattttgtccatgaaacatgtccaccattgcccatattaagccacataatctgcctacttttgtttaagcgggttgcgagtttgagagctttcagggggtattgacaagaacacaagtaacaggattctggtggtctcaatgcatatatagatgtctcctactggacagcttgagctgtgctgaaaatatgattctgcacaactttctgaagtgcagcaagtgttacgcataatgttccaccccctcagtgatttagatcctaaagcagcaccagtggacaagttgaggtacttgcatcccttgtcttcacttgctcttctggcctgtgaccctcagaaacacacatatgttgcttgcctctatatggtagctttctagagcttgttagtgaaacatttgatgggaactgttgactgaggcttataatttgaatggttgaatttgatgaatctactccattacaagtatttgttattttccactatgttctctgattttcagcttctctctcctaggaggaccttgtttttctcctaggggggtaggggatccacagtagtcttctattctcttgggtttaattctctgtattttttctaagttagtggaaaacaagctatgcgcagagagaactacatacattggcaagaagaaaattcagtttcccttaatattctgcatcatagacaggttggatagattattgtgcaatgcaagattcttcaagaatctctccaggctgcattcgtattaaaggttggtgtgcttagcgtaatcctaatagtataaccacctctataaaatcctattcggtccttctggtgctaggccctggaattggtaattaaagtcctggatttagtaatcggaatgaatatgtgctattactcaccagattacgtgtaattatttgtgagcacaatcagttcaactattcttctcatttctgttcgcaaaaacatcttgtttcatcatatcagttgaaactatacagtgagaaattcacttacattttctactggtattttgtttttacttagccacgtttattagaaatattaggctaaaaatcctaactaactcatcgagaggacttttcttatgatttcatttggtttattgtcgccatgctttagttttttttttttatttattgtgatgtatagtatatgtgcatttgacacaggatgaactgaacgagcttgaaaccatggaaccggcatctgctgcatgccaagggtaagtaaattctgagtgtagcatttgttttcccttgtacctaacgtttctctgttttgtgattcttttgtcctcttgatcatgccagagtgatcacaagtacagagggaaaatccgacccgcttcttcctgtgtaagtcgcgatgtttagctactcattctagtacctcaccctgcaagatctgaagatcgtactgcataaggacttgtgtaaccatgatctttctcatctttacagcaccattggtccagagaacgcttcttgggagagatggtttcagcgcgtgcgtagctctcgcagtaacaaatggtgggcatccaaaggctcagatttttcctagccccctcctgcaaagatgagactaccagctttgtgcagattaaaatcacctgaactgtatcatccacggatggcttggcagccaacaagaacacaacgtcgcttgccgccttgcgggctgtctagttcttctcaggacacgcaatagtttttggagagaattgctattgttgttaatgtatgtaatccctaacacgaacatggacgaatgtaccgacattatcttccagagctcttgattagctctgcttgattgattctaatgctttcctgcaatgccatgcaaaacattcagattgcgatgcacaatatgtccatggaaaggatctgggaagaaaaaaaaataacaccaggttctgacctttgacgctcagaattttacatgtgctgtgctgttaatcttcagtcactggccagctgtttatgcaggttatcaacttatcatgcaggtttagtctcgactctgaaatagagttgccgtggttgtgaacaaaatggacggcaaatcagctactccgtcctgaaatataaacatttttaaaatagtgttaagtcaaatatttttaataacaaaaatatagaaaagattaatcatcattaaacacagtatcataatatacaactctttttatttaaagctttttacttttaaacatattattagtcaaagtttcatttcgaaaactatgctaaattcaaaaataattatattttgggacggagatagaactcgctactcagcaccgccacccagcccagccatctcctctgctctctctgccatggcttccaccgtcgccttctccgtgtcgccaattgtccgccgcctgcactgcaggaggccggggaggggaggactcggaggagcacttctatgcccgtcccgagaaccaaggccgtggcccgaacgccgcggcggcgtccgtgcagaccaaggccggaaaagatcaccgacgagcgcggagtggccgcccggctgccgttcccgacgccgcgggcaccggagatcgatcaggcctggcatgctcccccatagaagcattggattcgcaaagggggagaaatctcttgctgtcttcgtaatggacaggtgagttaaccctattccggtcgatcgatatgagaagtttactggcaaccataggtgattgatatgtaacacaacctcctaaacaatccgcattaatcacattgtgttcatctatgcaacagtttagtacacaatccatggtttaacaacaattcaaagtggccaccgatgagttgattgcacatggtaaaaattgctgatagactttgggcttttatccctctaaaaaaagaattgagatgaaaaaaaaaaaagaagagctactacacctttcacgatgatggctgataacacacacgagcattttgtcttattttatttggatgcgaactctgaaataccagcggctgacttagattccattagtactgatacccaattacccattttgttacgcaatgcactggatagaaatagaataatggctgatatcatttgagatgtcagcggctgggttctattctccttttgacttgtatctgattggtactgatttctgttttgtcagcggctcaagattggagacattacttatttaccttctgtaccattagtgtcaattcccttttgttatgcaatgtaatggacatctatcttacacgaaattgaccatcatattataaagataaatcacaatgaaagtgaatacacaatgcaatagatttgatgcttctgaaagcatttctgttagtcttaacctcttatttttccatggtatgaactaatcagctgcctagagtgacccacagcactgctctgcctgcaacattgcatatagtaattcgagagcacatagtaaaccaaccataatgatttcccactttgacttttggtttattcatacgtatctcttgcatctctaggactttataaagcatcatttgttgttttatgcattgttactctacacagcaaggacctcagagaaacatacaagcaaggtgaaggttcccaagatgatgtcctcaattgctgtagcagcagctagcgctgggctacgaggactagcacagcccatcatcggcaatctcagcagttttgcatctcgctacgttggagtggacatggcacgtgagatggtagacctggagaccatcatccttccccagctcaacctgatcattgcatctgccgagagccaacctcagcatgtgaataacatagtgcagaaatgtctgcaaagactcaaggtagagctgtctcaagctgaagacctgcttgatgaacatgagtacgatcttctcaaacacaggatgaaacagaagaaattatctgtgttttctgtacatggtcagtgccagggtcctatttcaaatccttttatttgggttctcagtaatatatctagcttatcccctcacaacactaagatgttgaatcatttgaaagaggtcaagagcattttagaaaaagcaaaaaatttccttggtgttctttcagttgcaacacaagtgagtgctgacactgcaggaagcagggttattcaagacacaacaacctttcgtgaggaaaaggtttttggacgtgacaaagatcgagattctataatcaacctcttatttgatcctgccatggttggaggaggaaattccaatataaaaggctacagtagcatcgcaattgttggagctggaggcgcaggtaaaactactcttttgcaatatatctgctctgatgatagagtacagaacaatttccatgttatttgggtatgtatgtcacacaagcttgatattcgcaagcatacgacagaggttattgagtctctggccactgaggaaactcctaagatacaaaatctcgatactcttcaaagaaaactcaagaatttgctcctggaaaaaagggaaaaggaattattacttgtactggatgatgtttggtttgaacaaaggcaccatagtgagtgggaacaatttctggcaccactcatctcggctgaatttaacaagggcatcaggattcttgtttctagtcgttccaaagaacttccttcagttctaaactgcaggaaaacagtttctttagaggacatagaggagaatgatttcctaacatttttcaggtactattcccttggtcatgtcctgatagggaacgaagaactagaagaggaactacaaggaatcggagatgatattgccaagaagctccgacggtcccctcttgaagcaaaagctgtagcatctcggttgagcagaatgttagatgttgaaatctggaagcatgcacgggatagcaaacaactggatgggaacataatggaaaatctactgtggagctaccagcgtcttgacccacaggtgcaaaggtgcttcttgtactgcagtatattcccaaaaggatacatgtttcacattgatgagattatcttactctgggaagcagaaggcttcgtgagttctaatggccgttcggagagagcagagggaattaccagacagtacttttacgagctgtcgttatctggttttttcggcaagcaatcacatgggaaagacagtcatgttgggtatagaatgcatgacctctttcatgatttagcagaaaatctttctatagatgatggctacaggatagagactgaagaaaatactgaaataccacaatttgtccggcatatatctatctctgtccccagtcttgagaggcatgctgcaagcatttgcaagcttgaacagcttcacacgctgatctttttcaaccctgtagcagatattggcaaatttctcaagccaatgctgaagaagctgaagaaactccgtgtgctgtccctctgctttttcagcagttacacactaccaaagcacataggcaagttgaagcatctcagatacttgaatctggaaaggacgtccatttccaagttgccaaaatcttcgtgcaaactataccacttgctagtactcaaaatgaacaaaaaggtgcccaaaacattgccaaagaaagcaaacaatctcatcagtttgaggcgcatcaacggccctttgaaagacgtatgtaatgtcgggatgcttacttctcttgaagatatgaaagaattccaagtgaagaaagagaagggatatgaaataggtcagctaggcagcctgaccaaacttcgaggacatctccatatcatgaatcttgagaatgtgcaaaataggaatgcggcaaaggatgcaaagctccaagaaaaagccaatcttgatgcattgcggttggtgtggaaccatgacacatacaagaacaacaatgttgacttggaggtactcgagggacttgagccttcttcaagactgaatgaacttgcaatagaaggttacagatccacttcatacccaaagtggttaagcggttgctctcaaagtttgaggtctcttgagctcttgaactgtacctttctagagaacctcccatccaatcttcaatgcttcgcccgctgccgtagtctagctcttctgaatctcacagggctcaagaggctgtcacctctcccagaaaatctcacaagtttaaaattcggtggatgctcgtcactctgcttcatttcaaaggaggaagaagaacatggagtaaacccggccagggagaaagctttgcagcctctgacgagctctaccgagctggaaacacttactgaaatcctaagactggatgggtcagaactggagcagtttcaggcatgcttccaggagctccagtatccagtaagcacaatttctgccagacgccgtgatgttgcgcaactggtcctgccattaacgctccggaggctcgagctatcaagctgcaacatcacagatcaggccttgtctgaatgcctgcgaagcctcacctctctgaaagacctggcactgttgcatatcaccaccttatctgcactcccgtcaaagcaggttatggagaatttgtccatgctttcatcggtgggcataacttcatgccggtctctctgctccgtggctggcttgggagccattgcttcacttgagaagttcgcaataagcttctgtccctcactagagctctcggaccgccgcatccttccctcccagctgaaggaggtcacggttcgtggctgcacgatccatgatggttttctgcatgatgatctaccatttctggtcaaccttgagatatccaaatgcagaaccccctcggttctacaagtcggtgcatggccttctctcaaatgcctgaagctgtgtgattgcctggatgtttgcttcctagtagggttacctgctctggagtcactccaagaagtgcagttggtgctcccaaaccttggagctgattcttttaccggatgcaaagggaactggagatcactccgagttaggacatcatctctgctccatgatttgtctgaactagagggctttgcgcccccgatgctgctgacaattgagggttgccaagagccagacttctcgttggagggcattcaaaatctctcatcaatcatcggcctgagtttcatgaactgcaaagtccaatccatttcagcaatgaaagacctcgcgtctttggagactcttgccttctttgactgcccattgctgatttcattgcctgaactgcctccatcagttcaatatctggacataattggctgccaaatcctggagaagagttgccgatcccgtcgtggggaagaccggcgaaagatttctcagatccctcacgtggtaatgtatgagtaatggtgatgcttggaacgctgcgagcattctgcaaggttgcaattggtgttcacttgtttatcctagatatcctgcaaggttacttggagaaatgaacttttcaccaattacactcgcagatagatttagtgattttttgaaagattaactgtaagatttcgtccttcagtagatagatacccctctatgaatattgtcaaaatcagtgagtgaattggggatttaactgttgatccattgagttggcccttagggctaatatgagatgaatacaacgtgaaaagacagaaataccccttaacatatacacactaagggcctggagctggagctcagccaaacagtttcagctccaccgaaatagggagtggagttgggtgaagctctctcacaaaatgtaccacaactccactctagacctaactgctgaagctaaatttaggagttagagctgtaccgaacaggcccttaaatcttggtagctcaactcctaatatggtgaaaaattgcctctcaactctgaaaactgcttaaaacttcatttaaaatctgatgaaaggggagacataacgattaacgtgggacgaaatccctatatgacaagtgaatactttcgtcaggttttcagttcttcctgtccttctcttcgattcctcgtggtctggtctgccatggctaccaccgtcgcattctccccggccgtcgccaatgctctaggagagggaggaggagcgattctctgcctgccttgagaaccagagccacggtcgttagggccggcgaggtcggggaggaccatcgaggagtgcgaggcggacgtggtcgccggaaatgttaggaaatgataggcaacaaacgataaaaaacaatagatcaatcacaaaagacacgagatttaacgtggaaaaccctcccaaaacaggagagaaaaaaccacgggcgccaaccaggaaaatatcttcactatatctggggtgaggttacaacgccgcacggcggcttacaagaggtatatatatggtagaaccctaaaagggatgacgatctgtttcgcgggggcctccgctccactacggcagaagttaccctttattaagtgcaaatgaatttgtatcagacctctgaatttgtaagttatcacatgaacccaacaagttacagagagcaatgtttcatctgctaggtgaagcctggatgtcctccggctgcaaaatctgatgatattttcctagtgtattactcatgttcagtacaattttctctagcataactgtccttgaaacctgtgtatatgtaaaagtataatttcccccaaagctgccgaatgagcttgtcccataatgacatcaaggctatgaaactttcccattccagccaggattgacaatgtgtgtagcagtccttgaaacttgaattaatgaaatgcacatatgatgcctgatcatttgtcacatatgtgcagctgccaagttctatgtgtgtcttatctcgtttcttgaatggtcgtattcgcaacgacattaaccatggtattgtcttgtaggtctccggcgagtactcgatgatcaaagccggcggcgcgctgaagatggtggacgacgagagggtgatgatggagtcgctgctgtgcctgcctccggcgagccggcgccgacatcatcctcacctacttcgccggccgccaggccgccaacctcctctccggcatgcgccccgtctcatccaactgatgcccaactgtactgtacgtgtgctcctctcttttcccctctgcatcgcgtattcgcggtacgtcgtcatcaatgtgttgcgatgcctggacattggggatgaataggatacgagatttgataggatcctatactcgtggggttcacatggtcattgacaggtggggcccacgctcctgctcccgccagtacgtggccctggcttccagtggccgcgctctactggatagagactggagtacctctgactcccaagcaggattcaccaaatcgttttgggtagagttaccgtcatcccgcggtttagcggttatcgtgaaaaccatgtgattattatggggtatactatgattttaaaaattgagaaggttaccgcacgtgtgataaccataataacagcactgttttataaatcctatgtcagcatgacgtatcggtgacgtcatcatctatgaattaccactaccctggttaattactccgttaattaattttgtcaaggtaacagcggcgtggcggcgcgaccaagctattcccagtggccgcatctgcgccatccagcccactaccaatgctactgtcctccaatcaaaccggctcattgttgctaagaaactagtaagtcagctgcaaacatattttaaaaagataaataaggagagagaagtgcagcgggctacttgtagccagctgtagcacgaactccaagacacagtgtgtgtatgataggtgggattagatattaatagtgtagtatgtaactattgtataaatgagctactagattagctattgataaactgaagctagtagttggcaatactattgaacttgctcgtagcagtgtcacgttatctgcagacagccggatgcacacgtcgtgttgttcgatgtgcaatcatcgagaagattgcactactgggggcacagggtagcgtagttggcactttgtgaaatgaacatggttcaccggtcccaacagccgatccattcgattcgagcaccctccaacactagctttgccgtacgccatcaggaaggaaggaggatgacacaaactgcaatgcctagcagagggttcccagatctcgagctggtgcgaacaacacaccttccaatcttccatatctcgtagtcctatatatgcactccccccttttcgtttggatgataagtgaaaaagacaatgctacctccgtcccaaaataagtgcagccatatgaatccatgtctaatatttgaccatccgtcttatttgaaaaaaatttatgagaaaattaaaataagttagtcacacatagagtactattcatgttttatcatctaataacaataaaaatattaatcgtaaaaaaaattcaaataaaacgaacgatcaaacgtgagacatgaacagtgtaaaactgcacttattttgggacggaggtagtacaacatactcgtttactttgaataaaaattttatatacttattcttaacgatgaaatagtaaaggctaaaaaaataaactttgacaaaaaaaaatcaaaataaactttaaaattaaagttgaaaatttaaattttctttaataagcataaacgaaaagatgaggcctcgcacacaaacaagaggatctttagtatatcctccatcttgttgcacgtacaatatgtgtttctaactctttgatagacgggttttttctccgaaacaggatagatttatgctaagaagatattacagtagatctttgttgttaaaagaaagagagagaaaaacatatgaacacttcaaacaaacgggttctacattttgaaatgtcgcaagagctgcaagaagacaaaccataacgctcgtagactctggtacatacaaaagtataagagcgagtatggaataataccgttttcactcttcaatcacctgatagatctataaaacggatggcactgatcaagttagcgtcttttgaaacaggtgctaccgattggattatcgacaacataacatgcatgcattggtattttatctgaaatattgatcatggtacaaaaagaatagtttaccactccacaaaatgggaaccgactatttcccatgctgggtcacttggacagttccatatgccaatgtcatcgagtgacagcataatcaaagtgacaacctttgggccaacgaatcatcaacttttttcctcaaaaatatcatcaaccctgtccttcccctagcataaatcggtctggctgattgtattgtgtattatatattaacgtgcaatcttttttgccgaaaaaaatcatcaaccttggtctaatgctttttagagaaaaaccacctgggctaatgttggctttggcaggagtcatagctacgcgatccaaaggttgggccagagactgaacgtaattatgtaacgtgatcgaacccaaccacacaaatacaggcggtcgctagcagcagcacatgacccccaggtcagaaacgcggagcaacgtgaccgcacgtgggccccggaccgaccgaccgaccgacggacgatccacggccaccggcgtcagccggccacgtgcggccgggatcatcctggccgtccatggcacctacttggcccacatgaacagccacgatgccgctgtggcgcttcgaccacggcgtctaccggaccaccgaccacagtggcacagtgttacgcacccctctctctcactgacccttgggcccaaccatgtaagagctagttcaataatataaccaactgctagcttaaaaaaggttaaaacataagtaatctataaccaacatactaacaatctactcatataataattagttatatatatatatatagcatataggagtataatatatcgtatcattaatacatacctcttccgctaaaaaagtttcaattctaagaatgaatttggacaatccatctttagaattttttttattggataaggagggagtaattcaatcatctctcacatactgtagtagcttgttttctctcttctccatataagggcatatttagttcccaaaaagttttttcctaaaacatcatatcgaatctttggacacatacatgtagcattaaatatagattttttaaaaaactaattgcacagttagagagaaaatcgcgagacgaatattttgagtctaattagtccatgattagccataagtgctacagtaacccgcatgtactaatgaccgattaattaagctcaagagattcgtctcgcactttctaggtgagttatgaaattaatttttttattcgtgtccgaaaacttcttctgatatccggtcaaatgtccgataagacaaccaaaaattttctcagagcctcagaggtctttagctcttaatccaggtgattatccttggaaagatggcacgagcccacgagagccatggacacatgcatatgatccatcgctgatggcgacagcgagaacaggaggcacacacgaagtacaagacgatgcccacttcactccctcctcggtttccagtcacgggcgccgatctcatcaaccacctgcatctcatctcattgattctgattctctcatctctctcactctctctcatcgcgtagctgaagacaaacgccatttcgatcctgatttgacaatcaccttgccctttgagatccttgtgaaggcagcaaaaaatttgagatcgcctctctcatgcaaacattctcatgtcattttgcatgaaccttaacgagaaactaatccatgctaaacatgagctgtcgtagatgtcatgtcatgtaattaagctcaaaattacaccgaaattaattaattaataaatccgatgatttgattcagatttgagaacgaggaaggaatcaaagaaagaaggaagaaagaatacatagcggagctcttttaatccaatttttcatccaatactcgcgaggaagaagaaatgaaaagaaaaaaaagaagaaagaaagcaaaaaaaaaaataaaaatcaagaagcaaaattactacagggagatcgaggtattatactggcgggcgccgctcgatccgccggcggcgactagttgtacggcttcaccggcggcggcggcgacgcgtacgacacgccgtacaccggcgggaacgggagcttcccgccgggcggcgttgacgtcgacggcgggtgtccaccaccgtggccgccgccggtgctgctaccgtgagacggcggcgagcagttgtgcggcgtcggcggcgggtggaagcttggccccgatggcgatggcggggtggatggatgcgagtgcgatggtggcgtggtggtcggggtccccgctcccggcacgtgctgcgtcggcggcgacgcgccgggctggcccgacggcggctggtagccggaggaaggcgacggcggcgagccggaggacggaggggtcgaggggatggggccgtacgagccaggcggcggcgcgaaccgcacgtctggtctgtcggccgaggtcggcggaggaggcgtgtatgtcaccggcggcgaagggtaggacggatgagtaggcgtgctctgcggcggcgagtgggacggcggagcggtggagctcgacggcggtgacgggtgtgatggggtggtgtggccctgcggcggcgagtggtaggacggggtcgtggagctcgacggcggcgaggggtaggacggagtggtggatcccggcggcgaggggtgcgacggtgtactgggcttgccaccattgggcgacgggtaggacggtgtggtcgagctcgagccccccggcggcgagtgggacgacggtgtggtggcgctggatggcggcgacgggtaggacggggtgttcgaccccggtggcgccgggtaggacgacgacggcgaggggtatgacggggtaggagagctcgatggcggctgcgggtacggacctctgcgccgtggcggcgagctcaccggcgccggtggcccttggccaccacgtccagggctaccaccgggcgtcggggtgtaggacgcggcctggcattgcgccttgctgcagtcgaacgggtgcgccgcagcggcggcgcactgcgacggcggccgctgccccggcgcgccggggatgcagttccacacgccgtcggcggtggccacgccgcagcccgggcgcgaggtgatgaagttgtccgtgtaggtgaagttcttgaggctggcgaggccgcagacgccggccggcacggccccctcgaagaggttcctggcgacgtcgagctgctcgacggcggccatcccggcaacgctcgccgggatcgggccctgcaggtggttgtcgctgacgtcgaacaccgtcaccttcctgagcagccccacctgcgtggggacgcagccggtgagctcgtcggcgatgagcacgatctcgttgagcgtgtccgccatcttgccgatggacggcgggatgcatcccccgaggttgttgtgcgcgagcacgacgacgctcgccggcgagttgccgaggttggccgggatggggttgcggaggcggttggagttgaggaagatggcgtcgagcgggcggtcgaacagcgcgggcgggatggagccctcgaagtcgttgaacctgaggtcgaggtagcggagcgaggggagcgcgagcaccacctccgggaacgcgccgacgaagcggttgttgctgaggtcgagctcgtggagcaagcggaggcggcggaacgtgtcgggcacgacgccgcagaagcggttggagttgaggtggatgagggcgaggtcggggagccccagcgggagcgacgccggcaggtacccggcgatgtcggcgtggttgaggtcaatgccggcgacgacgagacctccacctccgccgccgccgtagccgggcgacggcgcgcagtagacgccgttgtaggcgcagacgttggcgccgacccagctggcggtgaagttggaggggtcggagaagatggccgtctgcttccacgcctggagcgcggcgtacgcggcgcggaggcgcgggttggggaacgcccacgacggcggcgcgtcgtaccgcgacgcgaacgacgccgcgtactcctccgacacgttgccctcgtgctgtgccaccgccgccccgagcagcagcagcagcagcgcccacgccgcggcggcgtggccgcgagagatcatcgtggaacgacgcggcggcgacaggagcttcgctagtgggaggcgagtgtgcagtgtgtggcagtgtgtgggggagcgtgggggtgtgatgtgtgaggagagggagtgggcattcagagcgggtcacatgggtggagaggggtcacatggggggtggcggtgcggcggtggaggacgaggcacggacgaagaggagcgcgaagggagcgttttaacgtgggggagtttgatgattttttcccattttttgaatttttaaatttaaaaaacaaatattttcaagacttattttctactcccttcgtaaaaaaaaatcaatcctaaattaattattttgggactgatggagtagatcagaacatttttccgctccagctcaacagcagctcaacaacactgttacaccggtctaaatggcgtgaccagtgctatttgatcacgttgattcatggatacaccaattataatgttgttaggataatactatcacactaattatagattgtgtgacaattttattttagcacgctagacagtattggtgccatggtgtggctgaaagtttacagattttgaaaataagtttttgaattgtttattttttgaataagaaataaaaattcgagtttggtggtttggcggtgtgattggggacgtggacggatggatgggttgcaatgtggaggtacgtgttggttgctgcgttggagtagtgctgggctgctggctggtttggcgagctggatggagttgtttacgcatccccatgtatggccgtggcgtgatatggtactacgcgtcggtgtttgtgttcgaattagtaattcaaaaggttcgcgcctgtggcggcgcagagcagacagccaccatggatttcagtattctcccgccatctactttttaatagttatattttatcttaaaaaacagaccaacgatgagtcattctacttattatctatttaaatacactactagcatttctcgtaaacaagcgattcattaatatttacatttttcgatacccatgtagccaatcttgtgtggaagaatggagagtcacgcattaaatttaagaaagccattaagatgataatttgttggattaaaatatgtctatcaaaaataaattttttagatttggaaatatgactatcaaaaatagatggagggagtatttcactagccgtatccagagtttgcaaaaccgctcggtttcagtcttaaaaatcaaacgatttttaaatttttttgacaacaatttaaccacatttcgccaggagataaaggttttcaaaaaacttctaaggatgtgtttagttcacgccaaaatttaaagtttggttgaaattggaacgatgtggcggaaaagttagaagtttgtgtgtgtaggaaagttttgatgtgatggaaaagttagaagtttggaactaaactcggcctaaaccttttttttttactcgggaacggtttgatgaaatcctggctgtattgctgttttagaaaactctttttggtgaaaatgtaaatttaagcatataatccgtctatgcttctgtgtggaaccaagcgagcgatgaatatgaaatctcacagatattgagctgattttaacaaggttcatatagaatcaatgctttcctgatggacgtagcccttgtttagttctaaattttttcttcaaactttcaatttttctatcacatcaaaactttcctacacacataaattttcaacttttctgtcacatcgttttaatttcaaacaaacttttaattttaacgtgaactaaacatacctgtagtgcaattcatgcataacaaaaggacgacctcagattccagcgacaagaactgtcctgagcccaaaattgatggtgttcacctacggagtacgttgcaagaaatggaaacttgaaagtgatgtggtggagacaaggcttaacacatgcccagctcaatttactctccagttcaattagccagtcttgactaaactaattactactattactactaactgggaatcagatcatggaccatgcctgcattaactggaccacttggttacttacaaggattaattaccaccagctagagtcgtcgcccatgaagtcgttgcagttaattatgcaaggtaagagggtaattaagaggcgcatgattaggtaaggatcagatccagagaacctaacgtgccggccaggttagagtaatagttgcactagtaatacatctccattccgtactgtttcctctcaaacgatttcaaaggcatccagcttcaaaactttttgaaagcaatgagaatgcaagaggaaacagcttgttgatgcagacaaaggtgtcagtaatttaacctaaacttcttggaagctggtgcattattgtatttgtccttttgggttccaactccagtctccagtgctcttaaacttttgatttcttttttcaacatctgataataatcccttcatcatccagagatcaatccagtgtttccacaggaagctctgacaccctctcccttgttcaattgctaattagagggtcccacagctccttgattgcattggctccagttgtactactacactgaagctctgcaatagtacagtaaaattaaatggaaaaacttagtggtattttcaattttacaggagagagaattagagaagacagtggcatattcatgagtaattagtcaggcagtagactaccaaaatcttctgcagtaatagcaatggagtctcttgcactcaatgatactacaatttgcaaagctgatcaatgaaataaagctagctagcttagactgtaaacgtgtacgaggtagtactacaaaagctatatataatgctactaccagtataattatactggactgccaagtagttgctgtttttttttctctttccaagagtgtttatataattagtaccccacttcagtacttcagtaggagatctatatacatgttcatgtactgtgctgtacttttcatccgagttggcgacaccttacagaatacagagagatatgcaaggacgtaatagcagccttcaatatgcagttatgccaatttgcaacatggagtagtagtaatgatcatggcaaagtataaagccgtatgtatgctagtatggctgtaacatggagagatgaatgtagttcacatgatcttgtctccaaattcaactgaaaaaaaaataaacgtacgaatcgtttggtttggtttggtcctttttattcggagttattaagatccatgtgatgaccatgtatgcatactctagttagcagttacttcctccgttgcatctatatgaatgtgaacaatgctagaatgacttacattacgaaatagagggaatactagtttagtattaaattaaactttgattcaccgtacaaatgaagctgggagatatcaatgaaatagacggtatcaaacagtagagtagaggtggtgaacagtacgacgactggtactcctgtagagtaccatatgtcatttttttcatgtatcatttttttcatgtatatatctgcatttccggcgcatttaataggcatgaaaaatgcaattagcagggcgagatgagattaatttggtttacacgtcacctcatgcacttcgttgttgatggaggcatggccatgtgcattaatcgtcgttggatcaaagatatgagaagcgttttgatcaatctgcattgatgctttacgtttgtatggtactccctccatctctttttatccttttttatatgatactatattggttagtttaaaatcaacatcaaacaattttttttaaaaaaatcaatggtattatattgtaactatgggatcgatctgaggtattgtggtggattggggatcagtattctaatccatcgaggagatgtcttcttattcagtttttttctccttaattacattttttctggaaaatataatgtgtatagttatgaaatttataaaaatgtgtgacaacattaattctagtgatgtaccctactacctttgtttcagtttataaaactttctagcattacctatatttatataaatgttaatgaatctatgcacacttatatatctagatttattaacgtatatatgaatatggacaatgttaaaaagtcttataatatgaaacggatgaagtatattccaataaaaaaccaggtcaaagatcgatatatccaatgagaaacaaatagaaacagtttagacttgagactttatcagatggtttatatctattgtagtatgagttcgattgggctgaatggattggctttttcacggcatgcaaaaagagaaaagcttagcgcattataattgaccattaataattatgaacttaaataatgaatttgtttaatttctaaaaaaagtctattaaaaattctatgaaaaacacaccgtttaacaatttagcgagcatgcttatagaaaacgagatagccactagccaacttaagaagctgcctcgaactcagctaaattgttttacattatttttataactatttacattatcatttaaggtaattagagacatccacttagggattcttggaaatggaggaaatttggagagattctgtataattaaactgaactgaaaaacgtgcattcggaaggaactcttgaagttaaaacaaaacagtttcccatgaattgaacgggaccatggaatgatcgatctgagcacgagcagcagatacgcgagctcagctagcagctagctgtagcgccaaacgctgcccttccctgcaacttgcgatgatctctggcccttttctgctttctaccacggcgacgcgtaaagagaggagaagacagaagacgcgttttgatccacctatagctatcaatcatcacgcattgcttgcagctgagctgtgatcgagtttgcctttttctctcctttctctgttcgctgcatatgctgttgctgatcgagtactgtacatgcatgcagcgtctgatgcgattgcgagaaagttcaggacatttttcggcttgtctcccattctgccattttcatcctcctcactatcgatccactccaaagtccaaaccgtcactgggagagtccatttctcacaagccaaattgggacaaagtccaaatcgtactactccctctgtcaaaaatatatataatatttatattaatatttaccattattctttatactctctccgtttatattataaaccgtgttaactttttcctaattcaaattcatttaaatttatagaaaatatagcaacatcaatgacactaaattagtttcattatatttattattaaatatatttttatagtacatatattttgtgttgaaaattttattacgttttctataattttagtcagacttagaactttgacgttaattacgatacaaaatggagatagtatcaaaataagtacagttttatctccttacctttattccgcaaaataatttcctgttaatataggatatttcagtctttctttgaatattaagccgttagtagagtaaaaatttaaacagggaaaagaactgcacagctggttggtatgcttatatcaccatattcgagtgcaggtattctccaggtacaatgcaggtcgatttcgattcgattcgatttcagcgtacactggtggaaaaatgttttttactaccaatttagaacgtgactaaatatcgctatctttagttccgggatcaatctttagtctcggttggtaacaccaactgggaataaagagggggaatctttagtcccggtcggtgggaagcgacagttcctcgagatcttttttttattttattgttgaattgctaatggctagtgttaatccctgtattttctcccgaatcaattttctcccgaatcaaatgggatgcacctccccaaatcaacatcccaaatattaagttacttatacgcacagatcaaatacatcacaaatcctatacacaaatcaaatacatcacaaatcctaaaaaactacacacaaattaaatacatcacagattatacaaattatacataccagatccatgcgatgcaatgaatcacaaaatctaaaaaattatacatccagtgaaacacaaattaaaaaaaaaaagaaaagcaaacaagccggcaccctaccgcagtcgtggccgccgcccgcctgcccgcgcgcggccgcgccgccgccacccgccgcccgcctgcctgccgccgctgcctccccccgcgcggccgcgcagccgcctcccaccgccggccggctgatgggagggaggagaggggaggaggagaagaggaaggggaggggaggaggaagaggattggatgtgagaagaggaagagaggggatgtttcaatcttatctaaatatctgtctgggacttaaccgatcagatgtgggagagaaatatttactcccggttgataactccaaccgggactaaagatcaatctttagtcccggttgataccgggagtaaaaatcaatcgatctttactcccggttggtatcaccaatcgggactaaagtggtaatctttagtcccggttggtagtataaaccgggactaaagattctcgaccccctgacatacatctgataggggatgaaccgggactaaagatcctggatctttagtccagatcaaaaaatttttaaccaggactaaaaatcgtttttagtctcggtttttaatggaaccgggactattgtgggatttggttgaccgaccaaagatggtttctccaccagtggtagtaggcaagtaaaaccaggtggttggttattcacagaagatggacacatgcatgggcagaacgaaagagagatgagccggggagacgacaggcgagaggtggtgaacatgcgtctcccatatgcgaatgttctccaactacacgtacagttggcacttggcagactcacacacgctagctagcagcatcataacaacctcattgtaaatttagctattatgtctatttcaaaatataattaattttaactataatatagataaattatgataaatattgtttagatttatagctaaaagtattatattttagaacgaatgtgtcaggctagcaactgctactgctattggtacgtcagctcgcttgccttggctagctagctgcgctgggctgggttggcttcctctagctaaggctgtgtttagttcatactgaagtttgaaggtttggttgaaattgaaacgatatgattgaaaagtcgtgtgtgtataaaaagtttaatatgatggaaagttgaaagtttgaaaaaaaactttgaaactaaacaaggcttaggttcaattcgttccttgccaagcatgctatactttgctttgatgcccgaaataatggcaccgccctccttcctgatccaatgatagatactccattcttcctaaaatataaaaagatttaggtacatgtgatacattatagtatcatgaatttatgatatatcacatccacttaaaactctttatattttaggacggagagactaataaacatgtcccatgttagttcgacacaaaaaaaaaattatgggtattttggatcgctgtaccaccatttagagcccatcggttgccctaaaacaataagctaaagttaaaatataaatttaaaaacttaaatttaaatttaatttcaaaatattttaactatagattattttcagtattactttttaagtcacgaagaacacatatacaagagttttgcatattatttttttatcactaataagccactacggcttataattagcttttgatcaacaaatgaaactcttagatatgcctgaatttttaataagatagttttaataaagcattgaaccaaatcagctcctagcatacctgtattgtggtatcaccctgtattttaaggacggtttaatttttctagctttttggtgatgggaagagacgaacatggggagtatccgtatcagtttgtgatagcttcacgaatcacgattaatgatggagtactggtcataatctaacagcgcgagacgtttgttcttcactgaaaatattgagtatggatggagttgttgggcacatcccgcacatgtataaagtttggtgcaggaatctcacatgcatgtagccataatttcatctaatttctcataaattagaaccgtctagcactctagcattgttgttttcttcagctttcttcagaaaccgaaacaattgtgctcgcaatcgtcagtgcacacctgtgttcagtactgtcagtgcacgcctgtaccatttcctgtgatctgaatgctgctagctgtgtgttgcttgaatcagacaggagtattcagctcaggatgcttggctgccaagaagaaatgagacactttcgccgtgtttagttccaaaatgtttcttcaaacttctaacttttttatcacattaaaatttttctacacacataaacttctaactttttcgttacatcattctaattttaactaaacttccaattttaacgtaaactaaacacagcctttggagtagtttgtgtcaatggttgttggacgacatgcatctgcatgtgacattgtgtgcacattgccgtacgtactgcagatcgatggagggatgggatacaggtgtgcactgacagtactgaactgcaaagtttcggtgtgaggcaaggacatgttcgatcagcttcctttccaaccaagcgagtgaacacagaacagaatggcatataatgtttggttggtaactaaatttgtcacatctaaccttagtcaagtcacagttttagtaggtagtatttgactcttgccataagtctattttgtctaactcttagccacctagcccacatgtcatacactctattttcttgccaaacgttgcctaagcttagtttgtcattttgtttgccacaaaagtatggctagactaagcttagctaccttagtaaaaaaatgtgtcacaatattagtcccaaccaaacagaccccactcatcaagaatcttaattgaccacaccacaatttggctaactgaaatcgtgtatttgtaaaacaaaaatagcatggtgacccgcgcagattgcatggctagcatcattatattatctcatataatagcatatatgttttctcattatattattcaaatatattaaaatgacatcataattttaaatttcgtaataactttgcaaaactacaaatgtgtaatattcatattgtattttatatacgtgttatttattaattatttttaatatcaaattttagttatttgtaaattatatatattcctatatggactctagactcgtcttttaatatttttttaattctgaattttctgtaaattgtatttctatatggctcttcttccaatattatttatttttatttatgattttttattatttctaattgtatttctatgtggactctaaactcatctctcaatattctttaatttttaatttcgaatttcagttacttttaaatggtattcctatattgactttaaacttttcttcccatgtttttcttaatttcgaattttagttatttgtaaattatatttttatacggactcaaaactctacttttaattttattatgtttattccaaattttagttagttttaaattcctatatggactctatactttacttctaatatttcttattttttaattccgaatttctatttttttcttaattgtatttctatatggactcttatactctacttctaatattacttatttttaattccaaatttctattatttactaattgtatttctatatgaactctatactctacttctaatattccttatttttaattccgaatttcagttatttcctaattgtatttctatatggactctagtctccttttctaatatttcttattttttaattccgaattttaactatttctaaattgtatttctatatggattctagtctcctcttctaatatttcttattttttaattctgaatttcagctatttctaaattgtatttctactagcaaaaatgcccgtgcgttgcaacgggtaaaaaaattctaataataatatacttttttcatgcataatgatgtcaatgacaatgtttctattttaatgagcagcttgtttttttataaacagtgtttttttttcttttgcgattttctcaaaccatttttcagaaatggcgcatttctttctaacagttttttcctaccatgttttttttctttttttacttatgaagaaaaccatatttttctccctttttttgcttttcttttctcgtgtgtttttttttcttgttttctcgcacgtttttttgcttgttttttttcgaaggttcttttttgcttttttccaacacaggagaatatatgacaaaataaagccatgtagtagatggcaaaaaatcgatgtatcctatccgactcaagcgtccatcaatttagcttttttctgacagttttttcagagcgattttttaatagacggtatttttttcttgcccggttttttaaaaccattttttttagaaatggtgtgttttttcgatagttttttcctcgcatgtttttttttaaatattttaccgacaatggaaataatttttctcgcgcgtctttttattttttttattgatgatggagaacctttttagtgtgttttttgcgctttttttctgacttttgccccacacgttattttaaccttttttattttctcatgcattttctctttttaaatagttagattagagatagagaagagatatatactggttagaaatcagatttggtttcgccctttccatttttttctctcttgcattttttattttatacgaaccagctttttattttttacgaaccattttttcaccattttcttagggaatcgaacggacttttttagatgtttttttgcctctataggaatcagactttttttttccgtttttaaaggattcggatctagcgtttttttgtcaccacttttttttttgccttttatatgaatcagattttgttttccgtcggatctacagtttttttcaccactcagggaaaaaacttttgttgttgttgtttttctttattttctttattgtgcggtttttcttttttccttttatgcacctttctttctgtctttgttctctttctcttttattattttttaacaaaaacgacctcaagtagcttgttgcaagattatagggactcaaatgtaaatataaaaaatatagggactcaaatataaaagtacaaatccaaaaattaaaatcatataaaaatggaatgctctcgacatgtagattctatttttgcaaacagatctctggcacatcaatttttttcaccaatctgagtcagactttttttttggcttttctttttctttttatgcacctttgcctttgttctctttctcttttattattttttttaacaaaaacgacctcaagtagcttgttgcaagattatagggactcaaatgtaaatataaaattacagggactcaaatataaaagtataaatccaaaaattaaaatcatataaaaatagaatgctctcaacatgtagattccgtttttgcaaacagatcttcaatccggcacattaatttttttttcaccaatctgagtcagtttttgtttgtaacagtgaatctatatccggatacaggagtcggattttttttttggttttttttatcggacaaacctggtttttttccgtccgttttttttggtttttttcgccccttttttcttctggatcggacttcttttttccattccggttttttatcggacaaacatggttttttctgttcggtttttttcacccggtttttttaacggacgatggaagcacctcttattttttaagtagtagtagatagatagatatggactcttaatgtgagaatttgtaggccatgagagcgaacgtggagattcttttttctatccttttaataatataatagatgtggagtactcccgggaaaaaatatattaaaatacacctttttgcccgatgatttaataggaatatacacgtttagaagtgaatagcagaagtataccactgtcgcagaatgtaagtgtgagacggcgcgatctcacgcgactaatagattaattagtgcaattagcaattaatcaattattattattttaattaacatcgttagtaattaaattaatcactaatcagtatgattagttacattagcgtcaactcgagccatctcgcttggccaaccagcgagactgaacgttctcacgctctcgccttacgagaccttcgcgcgttggtctcgtgatttcgcactaccgaaccgcaacaacggtgtattcgtgtaaatccattcaaatcttatatatttctgagacaaaaaattcaaaagtataatttcaaaattttctggattgtgtttttcttttttttcttttttacatgaaacatagaggaattgtcccaaatctgcctggactggaagaacagtagaagactctaccagggaagagatgcagttgggctgtggagagtccacgtaggctcactaaagcctgaggctatccacccttgggaaatgcctctgctgccttctccctccacagaatggcctcgatgtgggccccactggatcccggtgggcccgggccaaacgaaccagtaaactaatagcttcgcttccgagttcgagcctctcatgaccatggccgccgccgccgccgccgccgagctcgacgagacaagctagacgtacagaaaccgcgcgaagaagaataagaatgcggccgtggcttgtgccgccgccgccgccggcgtggcacggcgtggtgatcaggatgctgcaggcgccggcggtggtggcgctggccgccgtgctcgcggcgtcgacgtcgccagcgacggcggcggcggctgctgctgatccggctccgcaggaggaggcggcggcggagggcggcgcggcgagcacgctgtgcaacgtgccgccgacgctgtcgggggaggacaagcaggcggagaagataaagcacccaaagtcggcgagcgccatgcggtgcacctccaagtgcgtcagcacctgcgtcctcggcggcgccggctcgcccggcgtcgacggccccttcaacatcaggaggtagcttcattggtcgccttatcttgtcgatcttaactaatcaatcattcagagttaacgagatgaacacttcaatgcttctgctgatctcttcaactaattccttctgctccgttcatggatggatcgaaatatatgcagaccactggtggtgttcaaggaggattttcgcagccgtcagtactggtacacgcaattttcctgtttcaattcgcatgcaaatcctcatcaattcacacgcaaaaaaagaaaagaaaagaaaagcatcagttcatcttcatcttgtgcatgtgtagccttctggaatgctcggacatctgcaacctaatcaaggacggagaagatggccaatgactcgagatgtattatgctgcttcaccaagcagattagcagctaagacacgcgtgaatccgtcaaggaagcaatcaagcattacagaatggatgatttagaagcaaacaagtgattagcttggaacaaacgtgcatgccggcccagattaactgaagaaccatggcgtcggacctgtcaactgaatcgtgatacggatgaacacaagtccggtccatactgtatactgtacagttgcattaggtctctaacaacaccgagttagcttgatgtagccagctccctacgtagtgcgaaatcccgagttaaatttaagattggattaagtacacatctccttgtcaagttgttcaaacccgtctctttgcatacgcatttgcacttacatgtttgtatatgcagaatagcttgcaaacttataattagacctttttttttgaactgatgatcacactgtttgcctaaattgtttgatctgcgcaatttggcatcttaaattgttgacgaactatgtttaatgcacagcagaccgtccatccagcagtccacataaatggccaaaaccaagcccagtagcccatatcgctatatgggccggcccatgaagcaggcagtctaacgatacagcccgctagcccgctaggtcacacgattgacaagcgattccccttcgtagttgtccgcactcgcgcgtcgctcgccggccatcgccgccgccgccgccgccgtcgccggtcgcaggcccgcctcggcctcccctgtctctgtctccatcctcgtctgccctccgcctggcgcccatcgccttccgccgtccatccgcggtgcttccgtactctgttcccatggcggcggcggcggtggaggagggaggcggcggtggtgccgtggcgcggatcttcgtgggtggtatttcggagggcgtggcggccgccgacctggaggccatgttcgcctccgtcggccgcgtcgccggcgtcgagttcgtgcgcaccaacggccgcagcttcgcctacgtcgacttccactgcccctccgacaaggctctcgccaagctcttctccaccgtacgcatcgcccccccccaatcttctcgtctctccactccagtagcagccatcaacaattcgatttctagcttatgtctgttcgtggtaggaatcctagtgtgtactagtggagatcaaattacgattaattttggatttattagatgattttacctattatgatttgtgccatgcttgctgaattgttgttggcctaagactgtttgagactgatgcttgtgtgcagtacaatgggtgtaagtggaaagggggaaaacttaggctggagaaggctaaggagcactaccttactcgcctgaagcgtgaatgggagcaggaagcggcagcggcgcaggaaatgccagctagtgctgatgtggagagcaagaaggagaagctcgagctgaataaggctgttttggatagtacgaagattaacatctacttcccaaaactgaggaaggtgagcaattggtcaggctgtgagaaacttttcttatgctcagcacttatgctgttcatgcatcattatgtgctctatagccacttagtcctgattcctgaatgggtgtgactgaacaagtaaattgtattccatccattaatatgcagaataacatgatctttgtgaactttaggttttctctatattttacattagtgtaaactgcatccttttatcagacatgctaatcatatcttttgtctttcagaatttgggctaaactaagcaggtgtaatttttaagatcaattgttgaattaagaactgaatcagaaactgggtatacattaactccttacataaacttacttggatacacatcccattgaaactatgcttgtaaaaaatgaagaggtgatatgtattgacaatgtttattcaatatgtcgattaattcctaaacatgcattgacctaatcaagatttcacttgacaggtgaaagccttgccttttaaaggcactggaaagcacaaatacagtttccggcatatcgaagtcccttcttacccaattcatttttgtgactgtgaggagcactgtggacctccagaggcagctaatgatgaatatgcttctgttcttgatgctgctgcatatgaaaaggagcgcagtattatgaattctgtgatgagcaagctctttgagaaggagaatgaccatttagattcaatggaaattcagaatcatggtgtcgattttgatgccgcggaaccctctaacgccaggaatgagttgcaaatggataaaagagaagaaacttctgaggaagatttggatgaccaaatggaagaaacagaagatccttctgaggaagaattggatgatctcgtgcttaacatcgtgacttgcaagccaaaaagctctgtagcacaattgaatagcgaaaagcaagcagcggataaggtatgcacattgcaagtatttcgaacattattctgtgatgaactactctgttgtgcagttatgttcattaacattttctgcattttcaggactcgcgcttcagaaaacgtcaacaatttgaagaatcttctctgcagaagaggcataaatcctctgatttctctgaaactagaaataggaaacagtctttccctgctatatcaggagccatccaaaatgaacaaaaatcttcagatttgtcaggaaaaggtacacatgagttctcatcagaactcgatggagataaaagttctgctagtgtccaagatgttgaagcactagcagattcttctaccagaaatgggagtgaacaaaattcgcttgctagtgaacctaaaagagtttccttgtggactcagaaatctgcctggagggatcttgttggtggcatggggagtgcatctttcagtctatcacaaatattgccaaacaccaatccagcaccaccaaaagtttcaaatgctaccgaggcctctgcttcacatgctgagtccaggacgaaagtgaaaccaagcgggaaatctttgaaaccctcggaagctgcaactcagctcttgcctgagcagaagatgcctacaagttccatggcaatgctgtctagtgagcgtaaggagaataataagctggaaaaggagagggtggttccaaagatcactattggtgaagtgtgtccgttcatgagaaattcagagtcagaaaagcaatggtcaaaggcaaagaaggttctgactggtttcatcaagaagggcaatgagagcactggatcgaatgtcgggaaagggaagccatcaacaaggagataacaacgtagcatgtcattccagcttcatcttgttgaactacaagctcggtagcatgtcattccagcttcatcttgttgaactacaagctcggtggtttcgtgtctcataggaacatgtgttattttgttgattggtctcatagtctgcctgttaagaatgatctgtctttgtttgtgaagcacaatgctatgtacgagttttgttcaaattgttattattctttgtacgagcaatttaaagtcaaacatgtttcaaaaagtgacatctaacgtgcaatttaaaaacgaacggtcaaacatgtttaaaaaagtccaatatattttaaaaagtcaacggcgttaaatattgggaaaattataaaaaccatccaaatatcactctgagtttgagatgcctctccataagaagatttattgcaaatacccacctcctaaaccttggtttgatttaggcacattctctccacacacgcgtgattcctaaataatctcgtggcgaaatcaaccgagtcccactcagcgggagcaagagattatgttgttttctatataagacgatcatttcgttgcgttatcatggccatttcattgtgtttttcatgatatactagctatatattccaaactaatatcatgtgtactgaacaacatatccgttttttagaatgtaatgggcatatagaaacatttaagcatgaagcagtaatcatatagccagattataactacatgacttcatctgttgcaattggtcagatgacccaaaacagcaggtttcattacagtttaatcagaaattaaggccacacaatctaatgcaaaagagacttgttgacaaatcatcacgatgagtggaacttggctaatttcgccacgagatgctccaggaatcacgcatgtgtagagagaaggtgcctaaatcaaagcaaggtgaattaggacgtgtggatttgcaacaaatcttcttatagggggcatctcaaacttagagtgatatttggggtggtttttgcaattttcccttaaatattttgtgacagaggaaggaccaatgtgtaattaacagaacagagggggcctttttgcaaaagtgaacgtggcacccctaactaactctccggcaatcccggtgttttaagtagacaaatgtattcgaactcctgcgggctgtggcgctcgtgctcgccgtgctcgccgaaatggttctccggtggctcaccaccgcactaccgctcgccgccgctgccgctcgccacgcggccgcggctccctcctccgcggccacgctcgccgccgccgccgctcgccacgcggccgcggcttcctcttcctccgccgctcgccacgccgccgcggctccctcctccgcggccacgctcgccaccgccgcggctccctcttcctcctccgcggccacgcttgccgccgccgcggctccctcctccgctgccgtggcggttctaccggaggcggcgcggcgagtctccgcggcttccctcctcgaggagttaaacgccttcccggagatgtccctagtggtccggtggctcggcgccgctcgccgcccgggagcggaggtcgtctccaaaattgcggggcgccgccaccacctcaccaccaccgccgccgccgcggctccctcctccgctgccgtggcggttctaccggaggcggcgcggcgagtctccgcggcttccctcctcgaggagttaaacgccttcccggagatgtccctagtggtccggtggctcggcgccgctcgccgcccgggagcggaggtcgtctccaaaattgcggggcgccgccaccacctcaccaccaccgccgccgccgactcgaaccttccaagtcaagcgcccggacgactcgtcaatcgggggggtgctcaagtgatcggcgcgggcgacttcttcggctgggagagcaatgattgcggctgcctcgccgacctcgcgccgttccctcaccgcggcgcgccgttccctcgccgccgctgcggtgctgcatcgccttctcttccctggtggttcgcggcagagcaggtgcgcttcggcgtgggcgaccccttcgagagcgatgatggcggcatactccccgatctcgcggcatttcttcgtcgccgccgccgctgcgcccacagcagaagaatcttcgaattcgagagcacccaccacggctttggcaagagcaacaatggcatgagcggcggttttcgttttatgttggatgacaccgacaagaggtttcgccatgtccgagctcggagaaatcggtggcaacagctggtgataaggaagatgttctcaagttcagggaagcgcagctcgtcgacttcaaggcaacagacgccttcgccgacctctttaccagcggccatccccagccaaccagcagcggcgatttcttcctcttcatctgagactaattcatccagtgagcaggaaaaaggggcttcctcgtcagcatgctacattgatgaatcattcggtaatcaggagataattgacgctgagacttatgtcaaggcaaatcctatgcttgttaaggcgaatgtactgggctcagcgaagacattctggagaatgtcggatatagcagtgagactcattcggcgacttgcgaggattctgaaaattctgcacgaacagaagcgttatctcctggccccgctctcagtgcaaaatctagtaattgtctcgggtgaacttaagctcaggaatgtcacccttgcagatgatgatttcagttttgatcggattaaatgtgattatcagtatatgtccgttgtgctggaagagttgatcatgttatctgtcggacaaaatggattgtccaatatccctcctgattttggcaaatacttgggtttgcttaaaggactagtcaaacctgatgacgaatttctgataaccaaccatgcttcgttattgcccatggcaaacaggtacacccgaatgtttttacatactttagttacttcaattagatccagtaagttatccaaaatcagtactcaagtaacacctagatgaagttttgcttagtaaactgtgtttgctactgctgtccttatttagttcgtagttagtactagctaaatacacgtatcttgctagctaatatgatttatgctactgttgtccttattatttagttcgtactacctaaatacacgtgtcttgttaatatgatttacgcatgctacattggttcgaaccaatttggtagtatatatattagtggcgaaaattgataagaaagcaacgacattgctgaaatttggtagggtaaaattgatttcgcgaacgctttttctgtgattttgctctattcatgatttgattgttcttattaacaagtttggtactagtagatatagagtttgtattagtgcgggaaaaaattggtagcaaagcaaacatatatgtgatagtactaaagttgccgaaatttcagtagggtgtaattgctttcaattaaacaagtccatcatgcacatgtttttgtgattttgctctattcatgattaagtgattgtttacattatttgggttcatttttttcatcagtatgcatctctactacatgtgtaggacggatgcatttatgatgatgtacaatcatattatgggctatcttggccgcaaagatcctaaaaagaagatatacattctatcacacctgaagtatgacacagactggcttcgcacagcgtcaggaaacagtgagatagggaaatggctttggcgccggagatacggccagactgttaaggagtttctgcacttaaatcggaatatcaggtcccatccatatgaacattccgaggaaaagatcgaagaagctctatacggtgaatggccggaactgctagttgaaatgcaagaaaaactgcacaaagagggtgaattacaaaacactgagatggagtcgaaatttgggcagcagtgattttctgcattgagtctgcatcatggagaaacatatgttctattggcgctgaaaatgaagacatataacatctgtgacatgtaaacaaatctttcatacatgcagacattgatcttgcaacatagtgcacattaatatcataaaagtgcctcagtgttttttttttctctcttgagcggaaatgatgttgatgtgcaaatgaacaatcagtttaatcttgggatcaatgatcgaggcacttgttgggtgtccatgcatgaggctcatgagcacaagattatgcaaaacgaacaggaagaaatatgtatggttcgtgtgcaaatgactgttgattgtcagcccaatattcatggagatggcgtacttccgttggcacaaattacttaattaattattcatgcatgggcgggcgcagcctattacacttgttaattaggcccacacggccggagttgagttaataacctgcgcgtatggctggattgttgtacttgtatcttggactcttggtttgggcgtgagcgagccgaacgatcaatttgttggtgaactgactgatttccggccggctgtctgctcatttattagcaggaggtagtttttttttaacggaaaatagcactagagtgccttttcattgaatagaggaggagaaaatacaacccctagggacaacaggaaaaaatcgaggaactgtagctatacactatacatagtgcgggattaactcgcgcagccgcttagcccctgctaaagcccaaaggctagcctcttctttaattcttgacaggaggaaactcgttgccacctctttgtggtcaaagattcgccgatttctttccttctagatttcccatacaactagtaggatgagtgatcggagttctttcttcggaacatttggcgtgtttgcgatgctctcccaccactgttgtactgactgtgcctcctctcattgagccggctcaatttgctgatatcccacccatccagcaacaaggcctcacattcttttagtgtatctacaagtggcaacgaggtgcaaggaggtagtttgatcactttggcggcggcggcggcgacaggcactgatcgatccatgcttctgctataaaatttggcctgaactcgaagagaagcgctggctctcacaaacacaaccaatacattgtcaaattaagcctgagctcgaagagaacggctctcacatacacaatcaacacactctcttgcctattctcaaaaaatacactctcttcccttccctctcactctcgatcctcaccacaaccacatgcacgcacggcactagctagctgccgtcgtcatcaccatctcacacgtgcacaccatttttctttcatcccgatctccattaagtacactattgctctctctctctcatctattcctttgggcttcccttaagctcgtccttgtccaccgtccacgcggctggtttctggtgttgtcaacttggcaacaaatatgatggcggaatgcaagacagagacaagtgtcttttaaaccatacaagattaatagctgcgacaacaagcccaaaccatcattaaaaaatatagttttattccattattttcattttttttcatcctcatacaaccatgttttcattttattgaggataaaagttgttgctgagcagttattacctacagtagcaatattttatctcttttctttctcttttccatgtcagcaaatattcataattagcaacattaagagatcatgtcgtgttaatgaccattgtacatgtctttaggggaggggaataagttcatctgaggtcctttaacttgtcaacgaatccgattttcgtccctcaaccggaaaaccagacacaacgggtccctcaactatcaaaaccggtgcagatgaagtccctcggtggttttgaaggcggttttggctgatgtggcgcctacgtggctaatttgactcggtcttcatctgacgtggcgcttagtggcaattcgagctgaaaaaataataaaactcgtggaacctacatgtcagttccacacacaaaataataaaaaaatggtgggacccacatggccccacatgtcatcctcactcctcctccctctctgtatcctctctctcccctctcctcggcgccgacgcttccatccacgcattactcaacgtggtggccgccgacgccgacccacctcgcgtcgtcctcgtcttcggcggcaggcccatccgcgttggcgccgagctcctcgacgccgtcccgtcgctccgctgcatcatcaccatcagcgcggggatcaaccacatcgacctccacactttaggaggcaacaggggtggaccccaggccttgggccgcccggtccatggctcgaggcctaggatgcaatctctattataaagtctattttttcaccatgtaatggtccaaactataatgggctggcccaaatcgtgggccaatcctgggtccaaccctgagaggcactagtgactagtgaggtcgtgtatgtttattgtgaataggttaagtttatagtatatatttttcactatttttctgggtcatttattttacttcgtttagttagcagcaatatctttttcccctttgttagtacctactatcgaccattaagagaaagatggaaaaaccacttaagaaaaagagagagggaaaataattgagaaacgcgagcaaggcaagaagatgacttgggagaggcgaggattttgtgccgtgaggaaaactatcacatcctgatttttgtttcaggatttataaattatttaataaattaataatagaatttatattaaatgttctttaatttacaagtgaagttaaatgtgggaaataaaatttcctaaatataaagcatggatggatttaatttttattaaattctccatgattaagtaaactctctgaaattttctcggatttttcagagctcaattcctaaatgatacaaagaacagttcagtaattatttgatcattaatgatctaattataattgttaagtgcttttcttgtttaaaatccttaaattataaattgttgtttaaaaggaattattagaaatgatttcaaaagcctagaagagaagatcttttttttaatttgctaaatctcaatataaaatggggccagataaaatttcattaaatactttgcttaattctataattcctagatttttctgggatttatttgagctaaggaagtatttttaataaatagaattgcatttcatgaataatttaaattgaaaaaggtttttaaaagtctcttttggctttgggccgaaagccggcccaaaatctctctctctctctccctcggcccagtccggcccagtccgacgagccgccgctctcttctctctctctgtcactgacaggtggggcccgcctgtcagacccgtcgtcttccttcggccgccgccgccgagccgcgccgccgagccgcgccgccgtctctttccaaattccgtcgctcctttccatctccggccgaattgatagaggggaaatgatcctctcgatctcctcttccttttctcttttggaatcatcacctaattcggtttggaaactcgtggattcgatctcgaatcggatcgacttctctcctccgaaccctacctttccttctcgtcgccggtcgccgtgggccttcgccgccgccttccaacccctataaaaggatccccggtgtctcctctacccgccgccaccctcgccttcgtctctcgccgtcggaagcgctctagcgccgtgtagcctagcgccgccgtcgccgccgtcgctccagccgcgcgccgccgccgttccagacgtcgccgtcgctcgggaagaccgccgtcgtggtcgccgtagcgtcgccgtcctcgtccgccccttcgccgccgccgaagaccaccggagcaccgccgtcaccgtcgacccgaagaccgccgccgcttttcctcgtcgccggcgccgtccgttgcccttccgccgttgttttggtcaccggtgagttcgccgagtcgccctctacccgttggtgccttccgtttgcgtcctcgcgccgtcgttcgccggcgagcttgcgctcccgagccgccgccggtgctgacgtcatcgtcgccctctcccgtgagccagtcgtggaccgatcgatctcggccgtccgttttggatggatcgatctcggccgtccgttcccgtgaaccgccgccgtgcacccggtccaccgcaaaccctagccgctgacgcaataatccttcttttccttttcaaaaataattcattattgcgtcataattcaattaaaatccatataagtgttttaatccgatttaatctttaaaaattcataactaattcatcttaactcagtttaatgtggttcaagttgcaaaagttgtataaaataaagatctacatattaaaattgtccataaattgaattaaatttatttaattctttttaaatgggctttaattagatttaatcttgtaaaattcataataaattcatttgaagtcagaatgaggccgttcaagtctcataattcatctaaaattatgatctacatgtttgtttactttttatgtattgtttatttggtttttattagtctttttcttcgttttgcgtgttagcttgtcgtttccgtcgttgcgaaggttcgcgagtgcgtcggaagtgttcaagaagattatttgaagaccgattattgcaaggcaagtcacacagatcctaaacacaatcctttgagcatgttgatcctatatttaaattctctatttatttcaactgtgcatttgttttcgaatgtcactgggtggtgtgaatctattcctttgttatggcctgtttgcattgattactttattccttgataccttgggttattataacttgactagttgagctatatatattggttcagctagatattagatatgattgcttagccatgcttagaaacattagcacactattgggataacttatgactcattattatttaatgatggcttaatgatagttcacgatggttaatcgtgattggttaattaattacttgccaactaaaacttgataatggtgggttgtgagcacatggttttgagagtcgtgctcatgacaattaaggaccggttcgcgagctactattgtgaaacattaatcgtgccaaccacaagccagcgtgggcaacggctttaccttttgtatagcatggttcattgcggagcaccagactgagaagtggcggagataagcccacgggggtcgctggggagtccatgcctctggtttttgagggggtgattatgatccaggaatggtgcgctgcggtgggttgtgttatgcaaggggtaatgtcacagctcctttccgaggtaccgtggtggtactgaggcacatggtgacatgatgtggagctgtgtcttgtgggtacagtggtacacctctggccagagtaaaactattcgaatagccgtgcccgcggttatgggcgggttgagcaatgtttttcgtgattagtctcacacctctcacaataattatggatgttatacctgataataatttgcttagctcctggtttggagttagatctgttcagccgggtatggttgttcagaatggttgggcctgtgcagcatgggtgtgctgttcagtgttgattaaaatttctgattaattactccactgttttacttctcttaaatgttttgctaaatgctgcttttgcaaatgagccaatattatgccattctttggtatccttgtgcacttgcgtatttgctgtgtggcttgctgagtatgtcatatgctcaccttgcaataatcaatcaacctcagttgaagaaaaaggatccagaaggagaagacgtttggcttataccccagttgagctgcctgtgggagtggagccggagcttcgctagattttattttccgctgcagttttcttcatgacgaggactaagtgcctcataagtaagtatttatcgttttagttaatttgatgaatctgtatattaaattgtcagtttgtgtacctcggctgattcctggacgaggattttatgcacaaataagttcggaaattactagtgaatttctgggcgtgacaaaaactagaaaggaatgtgcggcgacacgccgcgcacacaaatatgacttacatcaaaacttcttttaaacacaaatcagctatgggctatttagttttttaaaaaataggagtcataggttatttggttaaaaaaatcagagaaaggacaaaacaagatgcagacaatgccagtcgggcactaagatgcaagtgatggtctgatgagtgatgaatgccagatggaagcaggcaagcagcaacgagtgcagggtttcccaaaccgacggggccagggttatcgcgcccccgtaaccgtatgtaaccgtgtaaaatttatcaaaaatttaaattatttttaaaatttatttgaatttaaggaggtaaccgcggtttttctattatggtactcccgcggttaccgatggtaagtcaaacctagcaacaactggacaaacgactctacacgtctgaacaccctgttaatctttactaaggtggtgattgggaaggagggactaaattttaatccctcttacaaaagcataagtttctatgggaggaactaaaatttttgtgagagtccctcctttctaaacaccacctaaataatatgccaacgtgtatgtaccagtcgcctaagcaaaggaggtcgttctctcatctcgtgtgcttttgttcgtcaatgcaaccgagattcaatttattgccaattcagtctgcaatataatcctaaaagaatgtgtaattgtgtagtgggagggtgtcacaaaactgatagctcttctggtgggattagagtagaagtagccctcttccttgggtttgtcaggaataatctgcgtcctagatgacgcgtccatgcggctgctatgtggtgcattcacagcggaggagaaacggtcccatctcattgtgccgttttttttactgatcaacgagttcaactataagctcggcttgctgttactctaagctttcaatataagctgggccttgtgccttttatctcaaattagaaaggtaccccgcgtatgatagattttgaaaagcactatttctcaataatttttctacatcataatttttccaaactatttattagcttttaaaatatatgatatttaatacattcctataaataattatctatgatctcttcagtacagagctatatttagtttgtttagaaaacatttctaatttaaaagtaatatgttttgtcttatttaattgaatgtttagtggccttttgttaacaaattaaaaactattattattaataaatatgttttatttgtagaatcaagttatgcatccttttagttggtttttattgacgcaagttattacatacttagtatacactggtaccttagtgtggcttcttatatatgtaataatatgtggaaaaactcataatgctatggtatggtatagtatagatttaaagccattaatatctaagcatttaaaaattgttatgaaaatgaaacatgcaaaggttggttcaattttagtaaaaagtaagaactatttttttctgaacttattagactttctccaaataattcaatttagtccttttggcattttacttctatcattatagatctaatttaattattgtgcagttatatagaacgataaaatctatatcattttttttcataatttcagaattgtttgaatgtcatgctaaagtaaaaaaaatataaccccaaagtggcatatgaaaagttaaattacagtgaatatgggtttctaaatgtaaaacaatctaaagacataaacggatcgcgtgatttagatgttatagttatttatttttttagtataagtttggcagcattgctcatagttatattcattttacttttctgagatctaatttaaattgtgaagttaagtacgatgataaaattattactattattattgttgttgttgttgttgtagttgttgttgttgttgttgttgttgttgttgttgttgtttttgttgttgttgttcttgttgttgttgttgttgttgttgttgttgttataataataataataataataataataataataataataataataataataataataataataataataataataataataataataataataattattattattattattattattattattattattattattattattattattattattattattattattattttcatattttttataattgcccgagtgacacgcaaaagtctgaaaataaaacccaaaatgacatttcttttcaaagttgaattatagttaaatttgttcttcaactgtaaatttagtcataagaataagcggatcaaaaattagttatatgatttagattttacaaaacatattttttgcttttctaactaataaaacatgtaaataggagaaggaacagggagaaaagaggtcatattttttcttaaaaaaagtaacatacgtaagtacatacatgcctaggtgggcccaattttaggaggtaattttttttcgttaagattgtcagagggtgaactcctcaagcgggggacagtgaggccccccttgttgattcggtcgggggcagcgggtgaaaatcgaggactctatgaaacaggtgatgtagaggaggtcgggcccctcgtaaacgatgaaaccaaaggggtttatataggttcgggccgctgagaaacgtaataccctactcttgtgcttgactgatcgactgaggaatacatacgcttgaatcactgagaaccaagcgtgagttagccaaagaaccgatctccccctcccactaggcttggacctctttttatatctcaagagactgccatatgtgcctagaggtctacctaaggttgagggaggatactctccacattaaatgcatgtcttgttgcttggcctcgaagccacacgcacaggtgccgcggcatggggtccgtcaaatccaaacggctaacatgggggactctcatgtcattcaccatttaatgggtgaagatatttgggtcctcacttgcgccgggatatggaaaccctgctctaatcgggtcagacgaatcgactccggctgggatgagaggataaaaagcctctcatcatcacgatgtgacaggccgactgacatgcaaccagtgcgcaggcacactaccctggtcccattggtcattcgaccagtcagtctcaccacacgctgcatttaatgcggcgtgtcgcgcccgctcatgccgccttgaatgtggttaggtaggcgttgaggggcgcccacctaaccctacacacgtggcgttatgcggtggggggtcgggacagcatggagggggcggtcgccgccctacctcgggcccgacccccctcgggggagtgccacatgggtaccggggcaacctcctccctttgggcttgataccccagggcctgtatcaccgacaaagataattataggctgtaacgatttcaagtttttcttatccataataatgacatacttatatcataaatatgggttttatactgtaaatttattaatgataaattatctgaaaacataagctgatcaaatacatgtataatttagatactacatataaataatctaacaacataagcatataagaatacatgcatgatttaaattctttcgatggtgttcataggggtagggtatacgtgtgtgcatcctagggggtgagtgtgcatgtgttgtgagtgcccgcatttgttttgtgtttctaaaaaaaatactatagttgcttaaacgtttttatataaattttgctttccaactaatagaaggaaaataagagagataatagagtgaaaagagtagaacagaataggatggtacggagtacctacgtacacgaacgtccattcaaatagggtggggcccaatttagaggtagattggtttttcttttccatctaatctaatagttcaaaagaatgggtccaccaatttaaatgaaaatcgatggttagatgtttttctgccacgtggcagcttagaagtgctcgtagaaagtttaatggacttttagtatataatagatagataatagatagatagactataagctcggcagtagtcttcttgaagaccagtatctgtgcacatagaaacaagaaagaaggatccaattagcaggtgatttttttagataattattagcagatgaataggaaaggagataaaaaggattattcagagtttcagacacaataagtttcagcttagaacataacagttgctaagaatgcaaagactatatacacaaagcatccagttttgatctgtaattattccaacgatgtcgagtggagcctctcggtgtagcattagttgaggatttgagaacatccttccattgaaagaaaaggttgagatcacgcagcatgacatgggctgccatttaggcgggcaaatggtggaggtactaacttttgatagcaagggatagtgtaggctggcagttgtttctcaggtgttgtgtggcaaaagtactaagcaagatgttaccaggaatgaatttatcagcagtacctgtgatgaccgcccacaacttttgccatcataagtggggatgaaaatatcactctccaaggacaatataatctaacgctaccatctgggaggaatggttctggaaaaaacctgagatatctgaaggcaataatgtctcttttctcacctgaccatcaacaatgagaaaggaaattttataaatatgagatatgaaaggaatgcgcaatcagtagcattggagaagataaactgaccacattgggataagctgaggtaagggcagccattcttctttggccaccgtatatttcaccatcggcaatgtatatttgataactcctatcaatgtctagtgccttcaataccattgcagcctcctccattgttaatgggcagagctcatctttcctctttgcattcgagtcaatcaccttctctttccaccatgggtaagtatatctttcaattttcaaacacaatgtagttgttaatacagattgcaaaaattacttgagaaaattttagacaaaactaaatacctcattattgtgaactactccgtctcctcgttgttgcaaccatgtgcgcaaccagaggaaggcaaagcatgcccatttcatatcgctcgcaagtgaagaaccacaaaaaggcccattattacgaagaatttgaaccacacgtctacccacctcttctatttcaggggtaaatcacaatgcagcaaaattgacacaacacctcaaattctgaatctccataggcaggcaattgcaaggtgtgcatcggttttgttcaaatgaagaatcctgtacttccatatcagtggtagagtcagttttccacaaataaacacttacaatcttcaactgattttacacgtgattttgagttcatgacgaaaaaccaatggaaatgagagatgaaaccaaacctgactatggcaataagatatatcagaccaactgacaggcggcatggagcggacatatccaagctcaactcttctttacagccttagaggcagctctttcagtttcagtacccggaccactatcaataatgcaatgaagtaatcgacatcacattatactaactgaaacaaaagaaccacaagaggttgagtaatgagtcaggaccattcttaattgaattctggtgagtgccaactgcaaaaagaaggctcaccttggatcagcccaagatgaggttatgtccaattctaacacgataagggtgttgttgagggatatatcacatatctgacagacaaacaattaaaatttttgttcggccgcgtgatttgccctctcgtcgcagggtggcgagctccgggaagtcaacctcctccgcgcgaagctcgcggcggcgcgacgtgtcacgccccgaactagccccgagcggaactagcccgtgacgctccaatttaacccattaatcgataccagtcccaggaaacagtgctggtatcacagggagacagaatatcacagcaacagaggtctctttattatagagtaggagtacagtcatgttgggctgcggacccgagctcacaactgcattacgaaagggaagcggaagccaagacttggaccaaacatcataggcgcgacttgggaactaggccgaaaccctaaaactcatcgtagccgacttgctcctggaagaactcctcgtcagcgggatccgcttcatcttccttagcaactgggggggttatttatatagagcaagggtgagtacgggagtactcagcaagccatgggaaataagtgtttaatgcaggcttcaaggaaaggctgttgtttttgcaattgattttatttaaactcttttctgaaacaattaagtgagtgcttctcaaacgacacgaatgagaccgtgcgtctcgtccggtcggagtatgtgcaaggtatcagtcttttgaattgatcatggttggcacccggccaacggcttttaaacggccacccgggcctggctgatcccatcagccgcagattttccaaacatcgaacccaaaccacatcagcaaatttcacaagcagtaggcaaacaaaactacgctaggaatcacctcacatccacccatgaccgtgggcatggctgttcgaacagtttaataacctctacagagggggtacactttacccacacgacattactaacccggatcatccagcccgtgcagaacggccacgactagagaccttaaggctttcatgacaaggcatttcgaaagccgacacaggttcaccatatgccaacaagaggggtcccagaccatactgtgccaggaaacccgggggttctccccgacaccaccccgttgaatccacatgtctcttggcatcatggctcccccgattagctagttactcagccaggggtgtcccattccacccatgtggtcgcacttgtcttatgttcggatgaacttccaaggaaacggtccttaagtgcaagagcaggaaaccgtacacccggtacgttccccggtccgcgattttggaaattcatttagttcgcaagcaccgacccaggtgtcgggttttccaagtcttttgtaaaacccaagttttacccaagatgtttctcagtttttaagtttgaaggcgaccgtcgatactcgtgcagagtgcacgattaccgaggcgcaactaggtggttacaagggaacatggtataacaattaacaaaggaaggataagatgcaataagctaggtaggcccatcggtctgccttgcagacggggcaaacagattaagtgcaatcctatcaatgcataatatttttcaagcaacataattaagttcaaatataggctcaagatgttcaagggtggcttgccttgctcgagatcttgagcttgatcctcgaaattctcgcactgtgggtcttcgggctccgaaactacacgcgaaacgggacaactcaacaaacggagaaaataaagccctattattgacctctaggcatgccattagatagatctcgagatttgaggagttttggaagttgaacggagtcaaacggacttacggatggaaaaatattgaatttctaagattattggatttttggtctaaaggaaaaggatttatttaaatcctttttgaaaatgaaaagaaaagaaggaaggagggagggaaattagactttcctcgggcggctaggacgcggcccgagagaaaggggcggctcggccgaacctaacagaccggtcggcccgagaaggcggcccaaagcacgcgcgcgggcggggaggggagaggaagccgatgggccggatccatcccgcgtggtcccgagtgggacccgcttgtcggcgactcggctcaccgtgagcgaggtgcacgcggggcgtgctagggtttggggagggaggtgcggtgcatgcgcgcggttcgcggaggacgcggatacggcgggcccacgcgcagcctcacggctcaccgcggaccatgcgcacggggggggggggggggaaacggagggagcggctggccgggtcagccgatccggtcgtgccgaggtggctccgacgtggcgcctacgtggctgccacgcgggccggctagaggaagacgaaggcgccggccgcgaatggacggcaggcggcggcggtttctccgggacgccgtgcgacgatgaggggcgacggggcgtacaccgggatgacgagggagaacgagagggagcgagccaacggcttggattcgccggagggagtccgtcggcggcggattgcggcagcggcaaccggcggagagaaaaggaggaaacggcgacgaggtcacgaggggccgattcccggcggtgagagcatctacgcggctacgggaacccaccccttgcgccggattaggaggaaacgcatcgagggaggccggcgacgagagacgcttccgagctcgggcggcgacggcggcgagcacatggcgagcgacggcagcagtcggggcggctccagctagctactggggtactacacacgctactaaccaagtctaaggggaggagatggatcgaggaaggagaacgggggaatgcactaccgagatgaggcggggcgctgtgacgagatgccgacggcacgggagtgatctcttcggcctcgggccggggtagaggaagaagatgagcgcccggagtccccttccgcgtcctagcgcgcaccggctcctccggcacacgcgacggcggcggtcggcgagagagacagagggacggcaatggcgcgggtgaaaaactgggaagattgggaggggaaaaaggaagggagggcgcctgggtttatagggcggcaatgtcggttttggaaaccgaccttgggcggtcaaggtgcgagctggcgttcggcgctcgcggccaaaacggcgacagaggcggatgacgccggcggggaagaggaaagggaaaaaggaggaggaaaagggggcttaccccttgccactttggggaaaaggaggaggaagagagggcgacgcggcagagggggagagctctgcctccgtcccttggaggttagcgcgcggagagaggcggggccgagtcgatgacgacggcgatgacggcgggggcggtttggaatggagcggcgacacggacggcaggcgcaggcaggcgcggcagaggctgacggcggcggcgaccaggcggtcggccaccacggcgcgcgcgcgcgggggcggcgcggcgatttgggcggcgtcggcgggaacggcagcgagagcggagagggagggctcggcgcggctcacgggcagagagagagagagagagagagagatgggccgagaggaattcggcccatcgaacccgagggaggcaaaatagacttttgcggagggatttgatttgggaaggatttggattcaagattgaacttgacgatagatcggggatttgagatccggaatggcacggacactagacaacaagcaagaaacagatttcgcaattagggtttttaagagatagttttcccgctaggcgccacgacggaacgggcgccacacgacgcgaggccacgatgcacgcagtgaactctggctcgaaggttctcctcatcctcaagatcgttgtcctctctctacgtgttcttctatgtcttcagtgttgatttcgtgtatgtacatgtatcttggatggttatgatgggggatctcaggttgttcttggatggggatctcaaggatgtttttttggtttgagcagaagccgtcgtcgctcgacgcatttcccgtcagccgtgagctcggtgcctccgtgtacgtctaccgccttgcgagcgcgccgcctttttttattactagattctcattgcgcgccgccttttttgttactatactgttgatcagttttgaaatatgcatgatgatttcacaaacataacagtactatttcaagcaatctccaatttgaaaccatatagtatcacaatgtacttagcttacaacacattgatgaaacgtaccgactccgagtgacaaatctacatataagcacgctgtacaaagtggtacatctgagtttgaatatcttcaattctgtggagatcttgcctgggacaatccttgatcatcagttgcttgggtatttataatgcccatggagtagtcaaaaagagatggcactcgtgttgtagcctcaaaacaatctgcaaaaatattagttgtggaatatgctgaatggtctacttgatgtctaaccagattcatgttatatggtaggtgtgaaaaaaaaagaagatgatcctatggttcatatttgtgaaaaacacaatgaacaaggttgtttacaggaaaaagttgctttcatcaagatgttagcatgttctaaacctctaaatctctaattaaccattttaatgtacgtatataacatagccagcatccttaatgggtgttagtaatacgtagagataaaaaaatatgtattattattaatcgacagcgcattgcggcagcatttccaccataacatgtagaaaatgcatggcaataatcaacaacaccagataccaaacacaagatactaactggaactcttaaccatacaactgaaatttgtctaattgttttagagaaattagtggattcatcagataaacaaattataagaagcaaactctcatgtaagaagttttagatatgcagagatagaagttccaaaccccgacaggggtcgacgaaatcggatagacttttggcctgatgttcttgaagatcattagttttctatatacatttctgtggaaggaactggctgtgtatatctttcgtggatatagaggccggattaatgaaaatccattatctaaaaaattttctttggaaggaaagaaaaacaaaatgcaacagtatagaaagggaaaaaaaagggtaaatgaaggcacacaattgatagtgcatactcaggtatcttgttcttctgtagatggctagagctttgataggacaaagttttgtcatgtcaaagaactgcaataggtcaaaaatataatttgatcaaagaatctagtacagccatctatgattaaaaacagaaaagaaaattggtaaatgatagaaatgccatttccacgagattaatgatgcaatcattgaatgaacagtaaatcttgaaactttccttcagaaccagagtagccaaagttcagaaatcggaaccaaggtcagacatacaattaccagaggtaaggcatagcacatagtttccaaacgatgctccttgaggctgcacacacaattataacattagcaaatggcatgcacaattcaaaaccagtcaatttataataatttaacttatcttgcaaaataaattcaaatcaaccatcattatgttaacatattataattatacacatgcagaaaacctgtccttgtacattgtttgcatgacttctttgactatcttagtctgatgacatatgtatggatatcattctattctacaagtagtcattccaaggcatgaatgcatctttacacaaatgtgatgctaaaagcaagcagactatctcccttttcgtaccataaatccaaaacagtacacaaaagctaaaatgaagattgtgatataaagtatcctgtcatttacagatagaagatcaagatgacatggtgatcactatgagacatttataggccttgattggaacttgtaacttttttttgttgtttactatggtaattaaccaactcctgtatttcacattgcctctacccaggaataagaccatagattttgtgattggactgtccaagatatactgatcaaatattttcaggttgtaaagggatagaggaagaacagagacaaggagggtggttaggatctgttcatatggctaagtttttccttttttctatctctactaaattaaaaaggttcttaccttagtaattacaactaatgtctatgttcagaggttaaccttagcacttggacaaaacatcccccactacacaaccaaacctatagataaaattttctgcttggagttcagaccatcgatcaaccaacaaacatatcaacaagttctaatacgaagtaatatcacctgaccaaccctcaccttccagaatccatagccgattgttgtcctttcatcactaataagagaaggaaaaaattcatcgatcgttaggtattacttggacaaggggtcatctatgggtataaatacaaacccccctaggaggagagatggcacaaccaacatacacggaagccacggttcatatgcacccacctcatatgaacggaagccacggtagtacataatggactagactcatccctggtgcaatgtgcatatgtgtcagccatatgaggtgggtgcatatgaaccgtggcttccgtgtatgttggttgtgccatctctcctcttagggggggcttgtattatacccatagatgaccccttgtccaagtaaaactagggagaccaatatggatacaatctggctagtacttgtcgtttccatatagaactctatttgtccttccttatccggaactctttctatatacgaggtatgattctgagcttagtcaattactattagggatgtggtatccataaccctgacaattttgtatccctcttctctttgggttgtgccttatatggctgattaagtctattttcgatccctctactatttttatttgaccatgtcgtgccgggctggcccaccatgccaaggcatggctcaattgtcgggtcgtgccgtcgagcctcgggcctttatggccatctatataggtgtatgttttagagtcagaaccaagattacatgtaccggagtttcaaaaaaaaaagaaattacatttactggttttggaactgtcatccatgcatactagatgataccccgcgcgttgctgcgggatatttggataataccttcatattaacatttgtattggctgaaaaagaagaacaaaagtacaaagaaaatagaaaacgtgttataacttgacgactgactgaactaaaacaacagatctcacaaagcccttatccagttaaactgagaaaagctaactgggctggataataaggtttgtattcatgcaacgatcaggaaaaaccataggattagatcgaacggcttaaaagtgctgatgacgtggagcaatctttataagagtaaatgctctagtgggtaccaactgtataggaagaaaggataagcataaatgcctctaaattggtaccggttaaaaaaccgacatctatagtgggtatccaaccgacaccaatagggaactacttcctctgttttatattataagactttttagcattacccattttcatatatatgttaataaatctagatatatatgttcattaacatttatatgaatatggacaatgctagaaagtattataacctgaaacggaggtagtatgtactagtggacgacgagctcccatctcccggccgaggccaacgacggcggcgcggggacgacacgcgcctcccggccgtcatcccgtgaggcatagaagtagcagctctgctggccgtgttgccaccaagctcgccgaggaccgttgatgcctccacggctccaacgttgattccccagacgacaacgtcgtccccccaccacaagatttcgccatgtccaccgctcggccttgagcatcaccgtcctcagcatcctcgcgctgtcaaagatagtaaggcgaaaggaaggaatggcacactgacacgtagggccataatattttctcttttcccccaaatataacagtgccactttaaccaaaaaaaaaacgctttgaacgagtcgaggttttgcggcaaggcttaaggggctcaaaatagacttattccattcagagctgtttggggcacagggccggcggcccagagaggcggtggtgcccacgaagcctacacaagaccgatgccctatttaggtcaatcgtggactatggacaaccccacaccccaaaatccccaatcgccgcgccgcactgcgactgcgattctcccaatccccggtggatatcgatcggattcagatgaacactcgattccggcggccggaggtaaatccggagtcgattttttcgcaaatcgcaggtactctacgcaatttttgttcctaatccccaaatccccaattgccgcactgctactgcgccgcgtctcgccggccgatttggatggctgcgggtgggacgcaagcaatgaggcagttcgtctatctggtggtgaagggctgctacgatcgccgcctgcggtgttgtcgcgacagctacatggcggacaccttccacatgcgccgcatcaacgtgtcccgcttcttcttctaccccgaaccgccgccgccgccgccgctggcgatggtcgtcgacgctcggctgcctcgcccctgcatcaccttctgcgccccctgggtcatgcacttcatgctgctgggccgcaacagcgacaaggtgctcgccgtcgaccacaagggccgcaccaccatgtacgaccccgccgccaacaccatccgcgccgcgcccaccctcgcccaccccaagagactccccgccatctccctccccattggtgacgacctctacatcctcgacccgacctcctccgaccaccgctgcttcgaggccctcgtctacaagcccggcggccccgcccacgactgggtcaccacccgtggccccatcgaccggtacaacgactggcactgccaatctctcccgccgccgccctaccatccctactcctgcagcttcgtcggcgcaaacggagccatcggcggctatgcggtggtcggcggtggcggcgactcagcagagatctgggtgtcaaccaacgacggcagcggcagcggcaccttctctttcgacacggcgcggcgcgcctggaccaagcacggagactggacgctcccattccgtggcctcgccgagtacgtccccgagtacaacctctggttcgccctctcctccggctccaacaacaaccatctctgcgcattcgatctcgccggcgcagccgagccgccggcgacgcgcgatttctgccaagaactcaagccacccaaggactggaagctggtgtcatcccatctggtgcacctgggatccggcaggttctgcatcgcaagattcttcgaaaagccggtcaagattccagtgtgctgcgtctgcgacatggatacgcagacgtacggcgtcttcaccggcgtggaggtgaagaagccgggaagaggcctacggctacggatggtcaagcacagatcagaatgttatcgcttcgatgaccacattaaggaatgggtgctgtaatatttatctagtcttttttagaaagatttgtgcaaatagatgaactcagtagcattggatatgctggtgcttcaacaccttgaacactagcacaactttttatctctatcaagttttagaggagaactcatctgtaccttttcctgacaaacaagaagattttttattttattttggatgtctcctgatataggaggcaaagactgtttcagtgtttcttttttctgggttcagaaaaatcagaggatttatgtctcttcttagttcttatgtggagaagattcttcaaattgctgacgtttcttataacgcgagtcctgaaaatgcagaaaatgttaatgcagataactacacaacagactggaacatcacaggataatgttcaaaaaaggtacttgtactatgcataccttattctctgcaaattgttccctatttaattgtgctactgagctattgcacttgcgagttatgatgttaagcacaagattatccaattcttccgcaaaaggatcttcagtttcatccatttgcaggtcatccaaatcaacctcagaagtttcttctgtttcctcaatttgcgacatggatacgaaccgcacggtccaagctgttttcaccggcgtggaggtaaagccttgcggtaaggctggaagagggcttcggatgatcaagcacaaatcggaatgttacagcttggacaagaactcctctaccattgagtgctctaagtaagattcttggattttgttactagcaaaggctccgattagcggagctagctgctgctcaaggaagtaggaagccagcaataagctgcaatgtcataatactaatggtaatactccctccgtccctaaatatttgacaccgttgacttctttaagcatgtttgaccgttcgtcttattcaaaaaatttaagtaattattaattctttccctatcatttgattcattgttaaatatatttttatgtatacatatagttttatatatttcacaaatttttttgaataagacaaacggtgaaacatgttttaaaaagtcaacgacgtcaaatatttagggacggatggagtaataaacaagattcattaacttctacttctctgttttgcaagtcagcatatatattgggggacctggctgtgttgcttcttagttagcatggtcttattttccagggaatgcgcagaaggattatgcatattttgtatttttgaaataaaagtgtgcatctttgtattaagaagataaggcattaggcatgcatggttggtcagaatggcagagcaagagaaggtgtgcttacagaacaagttgattgccagctctacttgcttgtgttccaagggtgtgctgagatgcaatccgtctgtttgatgtacagaaatacggagtaactctattttatttgatgaacatacctatattgtttcatttgttgcctctagtctcagctcttaattttgtgtaaatctgaagttctgaacatacaaatcatatcaatcatggtgtgtgaaatgtgaatgcagcaggaattagaatgtcatgccatgtccctgttgccaaagtgaaagaatgttatttgcgatttcttttgttcaagggtggtactggacactggtataacaaaaactggataggtattgctcgaggttacaatgaagtaccacaagttggcagaatgaagacagagtctgagataatggtgcgaggttgcaaatgatttcaagtagatcagagaagtaacaatgatatttatgataatatgaaacagagatctgattgctcgtacaaactacaaagaacttgcatcactgctagtttcatcccatcgccgggggatggggttcatacagaataataacaactagtgtggtggcctgtgcaaattacgcggctagcatctttatgttttctctcatataatagcaaatatatttttttattttgttattaaaacaccttaaaataacaatataatttaaattttgtactaacttgaccaaactataaacgtgtaatgttcatattgtgttgtatttccgtgttgtatacatgtgatagttattaattgttttctaatacaggattttagttatttgtaaattgtatttctatatggactctagactactctttcaatattctttattttttaattactagcaaaaatgttcgtgcgttgcaatgggaaaaacagaaaatataatccatttgtccttcgtaagacatattttccatgtcaaaaagccaggtaacttgttcaaaataattcatttcctatctctatatctgccatcaaatacgattttgtagaaaaaaggaacatttttcagtctaatgcatgtttattgtgacctcactgtgctgaatatgatcgagggggggaggagtgcgaacattgagagtatgatagctaggctgcctcgaggcccatacaacatagtacatgggtcaggaaaaaaagaaacaacacaccctcgctccctcagcaccatgtgtattacaatcctttgtgggatggtgggaatcctcacttggactcaatggttgatggatgatagaaacaattcaaatatttttaatgaggtaataaaaaggcacataaacatgtaagaaatgtcatattagcagggatttaagtgtgtcgacccgtaagcccacttataaaccaaattagtgggtaatccatggatcaatccgcgggttatctactaattttgtttataagtggattcatgggttggcccacttattaggcattgaaatattgtattcgtaagttataaccatacatctcacacgataacataacatatgaacactcccaccagagctcatgaatgaaacatcaaaaattattttgaaaagcccgtagtgtgctctcgctgattgatttgtatagtatggtgcacatgacatggtttaccataaggaggcgcattctcttcgattcgtatatggagtggcattgcaaagctttatattgagactagtaaacatgcacgtgcaatgcacgtttcacaatatttatatgttataatatttgtgatattgtaccaaccaaatttatgcatcttgtcaaaacacaaacaaaacaaatataaaaaacaaacaataggaaacaatgataatgtggagaggtggtgccattgtaccaacccactctgagttccattgcctactttcccgtgcggccgtgccatctgcctctgtaatatcttcttaacattcttccacatagaacttgcttctttatgcccacatccatcactacagctagttaacaacttataataatgctgatatagtctcatctctgcatatcaaccatcatacaacagaagtagcacaaatttaggggaaagaaaaaatattaaacaattttttttatttgtcttgtatcgacaaaaaaatgcaatagagtggtgcgaacaaatagctgcttacatattttcatttttcttctagatatttttagaaatgcttctaggtaattaacatccaactgtataacagaaaacataacattgttatcctggaaaatgagttataagaaaacttagatttaatcaaacagaaatagaacaaaagatggtaaaggatggtattccgttcggatgggatgatacctctgaccagtatcaggtgattcctaccagtaccaggtgatacctcagtggtatcatctcatccgaacaggataccgtcctgtagcatttccctgaccttatgagtcccctaattttagtattgtatttcttgattgctgattcatgcatgataatataagaaatcgataccgatcattgccaatcataagcagaactgcattgacgtgcgtcatatagctacaggtactatcatgacacttagattcttattttgcatagtaatgaaagcagacatgaaaaaaccacttatctacagtttgcccaggggcggatccagaaacaaaaaattgggggggaggggggctcaattacgcagtttcttcaacctccagccatctaaggacctttagtttattattcatggtgaaaaaattgaagggaatgctctggggggtatcaatggatcttgtgggtatggggggactcgagtcccccctgcacccacgttggatccgcccctgagtttgcctagactatttaatctagtttagcattgcagacagctattgaagtatttctaacagtaatgactttctcaatctcagatggttcatattgctagagcctacctttcccattatatagcttgctctctctctctctctctctctacatgtaggttcatttgggaatcaactaattacctcatgttaattccctattagttttgcagtacatggagcagcacaagctcagatgatgcacctcagcatcggtacaatagatatatctacaagaccaacttctacaattttgtacaaaattacaagatttttgccattttgactctcagcttatacgacagtctagttttctgtctaaactttcagatatgaaaagatcgcaaattgtatgcctccatctaattggttgattgtaagactggttggacatgccatccaaaatagatagactggttgaatggacttgaaaattacttcaaccatgttgaatggagttgagaattacttcaaccatcttcctgtcatgagatgctcgtgcaatgctctcgatgttcatctatactaatataatgtcgcatgtcatagtatataatgcatgtcaaaacgtgagcatgcactggtcatagatccacaataaatataaaactgagatataagcagtctgtgaacatttatcaattatcagaagattattagaaactaaacaccatgcaaaaatgtgggatgcgacccaatggacaaatctgaggtaaataaaaaagaaaatgagtagagcatgttcaaatccaattaacgggcaatgcaagcccaagtccaaactttgtaaagttaaattcaatttaagaataatttgtatcaatataaaagttgtagaacttatagtgtatttggcgatggataacctagaaaggaataacatatttggaaagagtttccacaaacaccttataaaaacacactaatttgacatacaattttgcaggacagaaaagggaaaattcctaatttggaaatgtgcagtgaatatttacatgcataattgcataccaatataccattcaactttacaaactttacttttgtctctgaaaatggaagattaatgtgtaaattacaagtaaatcagtaaggacaattctataaaagaaaacttggtggaaaagaagtaagcccaaacctttcatggttcaaagaaaaccactgcaattggcatcatgcattaatgctcagtttcattccacgaagaacacctatcactgctacacaagtgatctttaactccggttcgcaactgcctatactcccggttatgcaaccgggagtcccaatccgggactaaagataagtatctttagtcccgggtaaaataatcgggacaaaaatttgatctttagtcccgggactaaagaggagaaaagcgccagtcccggttgccaccttttcttttggtgactgatctgactattattaccaaaaaattgtagcgacataaatctagcaattccgtattttatattaacttgggttcttaataggtaaatttgcaattttcatgtgtctttttttttgggacaatttcgtttttgcccccactttgatctctaatattgattttacccctactttttagggttttcgtttttgccccccactttttttgaaccgaaagaggcatttacccctggtttggatgaaagttagtgggaccgggtttatggcaggaaataaagattttttgaattagtgatctacctttttacccctgtgaaagagctatctctcatctcctctcgctgcacagtcaaaccttcctgattatgttgtcatgctttgtgatacttgtgaggtacaatatgacttcatatgattgtgtaaaatgttgttgaaattttgtcaaaatttttgttcgatttctgtcaaaatgctgccgagattttgtcaaaattccatcaaattcaaattttgtccaaattgtaatgttaaaatctatccaaatctgtcatttaattttaaacatattcacaaaaataaatttccaaacattgcataatggggaaaaaacacaattaatgaatagttatgggagagggtataaatgtcctatttaacaccgttaactcctccatctaaaaaaggggcaaaagtatctttcggttcaaaaaaagtgggggcaaaaacaaaaaccctaaaaaatatgggtaaaatcaatattagagattaaagtgggggcaaaaacaaaattgcccccttttttttctctctacacgctttgcctgtttggcaatctgccagcgacaaattcgcgcgattcttccggagaccgttgaaactgactctctctctctctctctctctctctctctctctctgcttccaacctgaaacgggggagaggaacattttgccgagacgaaaacgccatacccaatctcgaacctgatcatgcatctcgtgctcgtgaaccagtcccttgattgggattagatctataggtcatacatttcatttcaaaggaagggaaggtatgatttctaactctgaatttaattttgcttgttcttactgttcttctctctgcgaaaaggggaattttctgtcgatcggaattggtcatctttggttggttcaggacgatggcaacgaacagttcagactcccggaggctcttattattattattattattattattattattattattattattattattattattattattattattattattattatgatttattgaatgagccaacagcttccaattctgctgtgtgaattgtcctaccccggtatgttcttaatacatcggtaaaactttcttcttaatccaacaattggtctgcatgtaactgtagtaaagaaagagtgattatctcaccatttgacttaccaagcctcagtatgcagtacactttggcctttaacattcagttagctagcagtcattacatatgaaatcgcataaaaagttttgcagaaattaggccacatgtttactgattgctgctagttttgcagatggacaagatcaatgggacgaacccggagtctaccgatcaagtgagtaatcatagtcattgcgagtagtgcattcagtatggattctccactggcaatatgattgcatcttttcttgacaaacttctcttttggttgctccatacttattcactggatttgtttctactgatttttcctatagaacaggccccttcattggctagtagacccgacgagttcgaggaggaggaatctcttgttacaccagatgcattgtctgctagaattggtggtttccaaatatatgcaggatctgtgaattggggggttttcggcagcatgaagattgtgtttctcaagtccaagctcaatgtgttgataccatgtggatttttagcaatttttctcaattacatgacccaaagatatgtaggcacaccaaattttcatctaacaattactttgttgattctttcctttgttttttttttcttttcttgaaaagaagcaaaagctttgccacgtatatattggatgctttcctttgcaacgttgtgctcttgtattgatattactgacttatctcttttcaagggttgggtatttcctctaagcatgctgggtattattcctttggctgagcgattgggttttgccaccgagtaattgttacaaactcaccttttattctctgaatcttttatctttcaataaacatctgatactttgtttctcattgcaggcaactggcacttttcactgggccaaaaggtttagctaagtttctcttcttctgacatattcttatctgaattgtattcacatgatcatgtgccagttgcattgtcgttgacttggcaaatttcatgtgaagttgggcgtcttctaaattctgcatttggcaatgcaaccgagttgatcatatcaatacatgcactaagtagaggaaaactacacgttgttcaacaatgtctgctaggatcaatcctgtcaaacttgcttcttgttcttggttcagcattcttcagtggtggacttgcttgcggcaaaaccatgcagacctttagcaaggtgaccattcttcattatttttacaagatttcatgatgaagaagaaataccggttaatctcggttgtcggcaggcagatgcagtagtgaactccggattgcttttgatggcagtgatggggttgctcattcccgctgcgctgcattatactcattcagaagctcaattcggcaagtcagaactagcgttgtcgaggttcagcagctgcattatgctcgttgcttatgcatcctacctttactttcagttgtcaaacaatcggcgtcgcaatgaagctaatgtggtaagtctgatgatctgatgggttaccatatacgattatagatattgcaattgtgttagatttcttgccctattgtttgtttcgtttctttgcaattttctgaagtatccgtgtatgcctttaatcaagagacgaattcaggatgatgtggatggcaatgatgatgaagttcctgagatctccaaacgggaagccatttcctggattgcaattttcattgcttggatatcaatgctctcttactacttggttgatgcaatagatgtaatagctcttctccatccttcttttactttgttttggtgcttgttgtttttgtctgcagtttaacaagaatatacatctttgtaatggaaactctttgtgatttgtgttgattaatcttacaagctcttttttttttgccggatcattaaatttttcaaattttacagggggcttccaaagcttggaacataccagttgcattcatcagtgttgttttgctcccagtggtggggaattcagcaggacatgctaatgctgtcatgtttgcagtgaaagacaaattagtaagcaccagcttgcaattggcaacaatcttgaataacattttatttacactaaaaatgtaaacttctatttttgtttttttatgtttttgtacaggacatttctcttggagtggcaataggatcatcgatacagatatccatgtttggggtgggttgtcttttgcctatcagattggactatgcttactagctgtcaagatctgatcatcaaaagctgatttttgcttacctcattttgtagataccattttgtgtagtgatgggatggatgatgggcaagccaatggacctaaacttccatctctttgagacggcaagcctcttaacaactgtactggttgttgcatttttgttgcaggtaataaaatcattgtgcaaagagagcattcttttaaaacaaaatgagtttgatttcacatgattttaaaacgttcttttaaatcacacactttcaggatgggacttcaaattgtgtgaaaggattgatgctatttctctgttatctgatagtagctgccagtttttatgtacatgctgatccaaattccaagggtaagtttatcgaatctgagatttgtttagcataaactcgctatcaatagagaaataagaaagtttaatttggacattttttataatccattaacactgggaattttgtccagcaagtgagaagcctccacaaaactaacaatacctggaatatcaggtggactatgcacaagatctctagtgtgtgaacacatttgcagtcagaacaggaactaattgtgttatttttaactgaatttcaagtgcttcagtcctcacatttagaggtctttcaagcacatctagtcttgtagataagcagaaactgaggagaagctcaaacatgatcattcagttgtgtaggcagcagttaccttgctattgtactggcagagatagcacaaagaaaaaacatttgtaaatttgggataagtattcatattatggtaatcagatttacagagtgaaataaagtatacagggaaccaatggcaccatctctttactggctccattttcatctgagttagtaatatatacaaaaaaaaagtcttcaaaaaagtataccataaaatcgcaaagaccaatttctgcactaactcatggaggcacatcagaataaaacaaacatacaagtccaagcactatattgtaaaaggttgcgaccatgattattcgtcatgcaccatttcaagatcagcctgaggctttgtctttttattatcaacttttgaatggcattctgcatcagtatctgtaattctacactttgacaaaggtgctgaagaggtttctgctttgtcctcggttttctccatcggtgcgaattcaggagattctccttctgttgtactagtcattgaggatatggattctcttgctttctgttgttcttccaatatcttctgcaaatatcttgcgtgttcctctatgcgcagctgtaattgcctttgtacctgatgaccaagaaagatgttaacactgcaagtttatctaaatatataatattcaggtaagcatgctttgatgaacaataatgtgtaaatttccttaatacaaaggtgcgcaatccttttgcgtattcccgaaaaaataatgtgtaaattgctccaaaaagaatactgtgtaaatactaagtcttgtaaccataatctggaatcagggctgctgcaaacatatgaacatacagtgtcaccttaattagccttcaaaatactgccctgacatgtctgatgcttacctctagttgttcatggagttgtttctggacctccatttgcatccgaagagcttctgccatttgagcactcctaattaagaaacagaaaacagtatgaagttttacagtttatgcatgcagacagcaggatatgttcaatgttaggcagtaagtcattgaaaggaagggagatgctcacttcttttttgcatgatcatttccattagccactgattttgttttcttttcttcttgcttcttgtctagatcgagcatgcatcagaaccaatagttaataattaccgacaaagctaattatttcatatttcctaagatatttaaacttcctctttggcttaattgccttaccttcttttgtctctggaagatacttcgcaagccgatacttctgcattgtgacaagtagtgttttaaccattataaataatgattttatatgaaataatttgactatggatcaaaaaaaattcactaaagcacctgtaagtggctctttatatgatagatggtcaagccctctaccttcataagcttcagaacacccttgggagttgcctctacaagatgtatcaaatagaacataaaaggatggttttattttctcaagatcaaattcctctcaatgaactagagtgatcaccctactttctggcccttcaagcttgttcacggcatctacgaaacgctcgtggagctccggtgtccacctcagtcttggtttgttacatgatgcagttccagatgaagaccgagatgaactcaactgaactttagcaggagatcttgcatcctgcagatcctcctgatcagagcaagatgacactggaagagacataagttgcggtggtctgtcgtatatgtcctaaggaacaagaaaataagtgattaaaatgcaaatcaagccatgataaatattcacaagtgaacattgaaaaaaccttttgcaagtagtaattgatacccattaaattagaggataaataaacatataatttagtacaaaaatatcaatgatgaagctaaggaactcacatctaaccgaggactctcctcattgtttgagatcgcaattccgagctgttcagacaagaactgaaactccatctgctcattataagccatggcactgcatttcccatggaagctacaatctgaagagaggttaagaaagtccttgaggtcatctgtgtgttcatcatcagcatgaccactatttctgagatcagcatcaaggagcatcagagagctggatgattgcccagctgaattctgctgctgctcacatttaggaggttgtggcaggaaaggcaaataaccggtttttcggcatgaaccagagttcatcggtgatgaggtgtacagacttgtacaaaatgtagaagaactagacaaaattgggtccgaaaactcggcttgcgacatgcgagaaagtgaactttcaccatttgagtcagtactaaatggaaggatctttggcaggctagatgaactgattgattcggtcttaatgtttgaggattggatagcacatgataatgaggtactatttgttgaaccacagagatcatagtcatagttagcgttggagagcacatgagctgatggctgtggaacagtgtatgcttgtgcgattttgtcagggccactgaattgctttacagcaatgacactctgtgtgctcatggctccttgagattgttgatttcttggtcattcacacctaatatgagaactgagatggaatgcttgctccaagcctgcactacaaaagtaaatatccagtcaatagcactgaaaaattgaagccttatcagagcatgtagtccaaaatgtgtgtgttttttttttgtcataaatagattgaaattttgttaagaaatatgggtacagaagctcaatcttgtcgattgggcttggcttctatcagaaagataacttggagacaaaagaagagataaaaccatgctaacttaaactaatatgctgaatatagtaaaattctggacaaaacaagatggacaaatgatttgaacctttcaacaatctaacagcagccaacctttaagtgacaagaaaagtcttgtctatacatcagagcacacatcaaactttcctattcagaagccaaactcaaatcaaatttaagaaaaatagaaacatatacaagccacctatgaaaatattgtatggtttgaggtaaaatcacatcaattaaggtcatggcattctcttttcctcagaaagagttgcgcacttcaaaagaaaatcatgacaattccaaccgatgcccgggaagaaaagcagaaaggggaagaacagaaatctgaaagagagcaaaaggagataggcagctgtcgccagagtaagcacacaaataaactaaaaaacgcaactgcaccatgagaattgagaaatgagaacaagacaacctaggactgcaaatccaagaaagaacgaagccaagaaggcgtgaatccaggtaagaaaatgcaaacaagatggaagattcaactccatctgataatcaagaagatgagttgaagagattcagaaacaagaacctgtcagtcctctccttccacagcaagcaccctctctcctctcttctcctatccaaactgtcctctctcgctccctctctctctctctctaaattactcctgcctgcaaatgattagtcatttctgtgaaccaccttggatggatagttgattgttttgactgttctcgtttcactctgaaagagtctgaagtagtagtagaagatacaagcacgctgttgctttctgttgcttttgtgctactgtgcttttgcacaaaatgctgcagtgtctcaacacctgcaatctgcagcaaaatggatgcctaattctgaagaaactcaagcaagttttgtcaaagtctgatgcttttacaaatccctcaatttatgttcacattttgttttaataatcaaccgcacgaatatttttcttgtaagctaagtcctcctatcctatgtggtggtagcagaattgattattgtaatttgtaaatcacagctaagctgtgacgaataggaaagcaaaaacttgctgacctgattcagattagcctagcgtaaatgccaaagcaaaacgaagccgtcgcttgcgtgacgggttgaccaaataattaaactgtgtgatgccgtcaaattaattaagatttcaagccatctatagtcctgcacccccgtcccaaaataaattcgtttctggttttttttccaacgtttaaccgtccgttttatttaaaaaagtttataaaaaataagtcacacataaaatattattcatattttatcatctaataacaataaaaatattcatgaaaaaaatcaaagacgagcggtcaagcgttggagacagaaatttataaatgaacttattttggaaagggtgtactgtactagctagtgcgtgtgcttgagttaatcatgggtagggtaagcttaatcatgtgagttcttaaaaaaaaaaagcttaatcatgtggattttccttcctagaccacaaatcactaaaacttcaaacatacaaaatgaagggttttgaaaaactccacggaatcaaactgttttgtactatgaaattggtgtgttcaaatttgcaaaatgaaactttcattaggggaaaaatcagaagaaattggtgtgttccaaaaggagtcggaagaaaataaaattccattaggggaaaaaaatcagcctgcatgcagaaatagtttccaactttccatgtgagttcgttttgtgttccggtggaccccacccattggtcccagccttccaggacactgattggtccacgtagatccactagacgacaaaactgatgctgctctgttctctaaattgtttctcgtaaagaaagaccgtagatgtacgcgtataacgacatctgaaaactgggtatgatagtgaaattatttactggtttgaacgaaattaacactacaaattaataatcagtttaccattatattaaattatttactgagtattccattatattacacatattctaaggctacgttcgttcattcgggttcatttgggttaggataaccatcactcccaacacgttaaacggagtgatatattaacacataattaattaaatattagctaaaacaactagaaaaataaataaatatgatttttttaaagcagcttttctatgaaaaaattaaaaaatatatattatttaatagtttgagaaggcagaaaacgatagagcataagttaggaaagtgttcaaaagaatgtagcctaaatcgtcgtgccttgtcaatttgagttgggaatgaggagggattactacttgttttcataaacacatgtctcgatcatatctagcataattaaatagtcatctatggaaaagctaattgcgggataattaagttaataattagcgagtggtcgagagattgccatggaggattagaccagtaactgagcttccgttgcctaaccaaatttgccactgactggatatcttaaactcttttgaagatctcacgcatgtctgtccaaatctatatctatctgtccaattaatcccaggaaaactaacaggtgtctgcctctcatgagatgcccatccaaattgagttccacacttgctgcaaactgcaaagtagtcctaggagtgtaagcatatgatgtaatcgtagaattcctgattcaatcatgctcggagtagtaaaacacggctgtggctgtgtttagttcgtttgtccaaattttattgaagtatacgcacacatatttaaaagtattaaacgtagactaataataaaataaattacagattccacctgtaaactgctagacgaatctagtaagcctaattaatctatcattagcaaatgtttactatagcaccatattatcaaatcatgacgtaattaggctcaaaagattcgtctcgtgatttacacgcaaactgtgcaattgattttttttcatccacatttagtgctccatgcatgtgtccaaacatttggtgtgacggaaaagttgtaagtttgaaaaaaaaaatgaatctaaacacggcatgtgttcttccccttctttaccaactcatctttctctttttccacgtacaccttttttaaactgctaaataatatattttttgcaaaacttttctacaaaatagtagctttaaaaaatcttattaatctatttttaaaaattattaatacttaattaattatacgttaatgaatcgttccattttacgtgcacgagagattccgaacagtctaagaagtctagaatggtttagatgtcatggagcaatatattagattatagagtaaacaaaaatgccacttatttgattaaggaccaaagatgtaaaatgtgccactcgtgttttgatggtgacactttgattgaattgagatatggaagaactgagcttgcaaagcatggataaggacaaaagcaacgataaggtgtgccaattccaaccaaggttttcttcttttctcatgttacatcatgatatccagtgtgcagtttccataaacctgctcttataaaaatataaaaattcaccctttaatttcaagcctagtagttcctaattatatactccctccggttctatattaattgacgttttgaacatgattaaggtcaaacttttataactttgaccatcaataactttaaaaatatttattttaaagaaactagaacaacatatataaatttatcttttaaagcactataataaaagtaaacatgcatttatttattgtatatattataatagaaaaataaggtcaaagatatatcttgtagaccgtgttattgtccaaaacgttaattaaaatgaaaatagagggagtagcaaattttctctacctgttatgtcagggctaaattaggacctcttccacgttggcccattaaaactttgggccatgttgacaatccaaataagctcatcagaatttggctcccaaataatgctacaacaaaattctatcaacgccagttaagccggcctatctcaatgtgatccatcgtataacattcgtgaaaaagcagacaggataatattttgtttttttgacagttcataacttcatattcatctggacgaccggagtttacaacaaagtgtctacaacatacagtcgcagttacatgcgatcggatattgcgaaaaatatgggaccttaagtgatctaacaaggcatgaatatcaaactcagatgatcattctgctgccgttacaacgttacatgattcgacgctaatattgggaaagcagggcaattacttgccttgctgatgctgccggtttgatggcattttctgttacctatccttgagctcttcttcgaatgcgcgcagtttctcccggataggtgaaaggaaggacttgaggtccttgcaaatctgcctcttgtcgtcggatgcgaggcccttgtcatcggtaaaccttacttctacctgaaaccggatggcagaagaaaaggatttgccattaccgacctgacttgtcttgattataatggtatgaaattcgtacagaatagtagctttacctccaagtcctccagctcaccgaaagaaaactcaggaatgtccagatggcctttgaccttcatcttttcttctttaattaaccattcacctaataaacattaaaagcgttagtaaacactccacaaagaatgaaggagaaactagctgagtgatgtcaattctgaaacttcatcgaagttacccttaaatttcaagcttagttcataggtataccctactctcttcttattacgaacggtgactagaaaggcctgccaatatcaaaggatatattcacatattaaactagcacaataaagagcaaacaaacagaaaatggccatctaaccatcacaagtaattgtacaaatttatgtatcaatagccaggtaaaagaatagcacttacatcaccaatgcatttagacactccatcaagagatgccttccctgtagggaattctagcgaatctaaagaacccaacatttcctgttgtgcagattagacagcattatcagagaatttctaaggctggaatgaggaatcaccaacatgttcttataggtactataagactttctagcattgcccatattcatatagaagttaatgaatctagacatatatatatgcctagattcattaacatctatataaatgtaggcaatgctagaaagtcttacattgtgaaacagaggaagtagtatttaagtacttcgccaacagtttgccagcaaactactgtacctttatcctactgttagcccatgaattgaggttcttttcctcccaggttccagcctgcagaagtgcagacaacacatcagaaccctataacatagaaaatgaagagtgctgcagtatagctactgctgcaacataccaacaactatagcgtcaaacaaaaacggcaagcttcaacataaactaaaagggaaaattgcctaaaatggcatgattcataacatgtcatggttagtgacccaaacaaatatatgcgatggacgtttagctatgccttgtgaagcctaaggtacgaagttacatttcttcttaacgtctatccacatcaatgtttattatgtgtctctagttacattgaacaaaattaaatttcatgagaacagaggtcccacctacaggtaataaaatctattttgcaggaaaaaagatcaatttacaccaaatcaataggaatcaaaagcacagtattgtcctgccagctgaaagtttcaaatcttttaaaccctgtttttgttattcttctattactctacctaccaaatgtttcctccaattcccacagggtgaattaagaccatggtcacagcaattgtttttgaagctcatagtacatcaaaacccattcaacctaaacaaaacatatgatatcatagaggaggataatgcagtccgcaagaggaaaccgggcgatgcgatagtgctaggagcgttggatatctcatgcaaactaagcaaaaaattccacctaaataaactccaccacctattggaaacgtatcaaatcaatcaaagagaaacgatgagcatccacgattccaattcagcattgcacccccaatgtattcaaatagtctccgcgaacaagactatgccgaacgaactagtagtgattgagagtaacaataatatcaaactccgatgaaatgcgagttcgttcgtgctagagatgggatatctatcatatcatatcatcagctcattccacgacatgaacaattgattgcaagtttgccacaacatatgtaacagtagtagcaacgtccattcccccaagtccgaatctgacaagaagatgagaggaggagggggaccccctcacctgattccacacggagccgagcggcggcgggttgccgttcccgttggcggcggcggcggcggtcgcgtcgagcttgcgggggacgggcagcggcgcggcgtccccggtggcctcccgcacccagtacctatacgacgacgccttctccgccgcggccgccgccgtcgcggtctcctccatcagcggggacaaatcagccgtttgctgcagatctcaggcgaaaggggggagatgagatcgatcgatcgatcgattcaaatcgcgttcctgcggttcggggaggaggagaggaggggcgggatttgtgcgcgttcgtactatcgtgcgcttcaatcttggctgcccctctctctctctctccagatcgatgcttccggaagtttccaggcagttactactggggcaagtggagtactactgctaggtgctagctactggaagcttcgggttctttctccggagttggccttcgagaaagagacagacgtggctgttctgtttgactttgacttcgagtttgaaacaaaaaggcaaaaaaatacattggtttttcatgttcaagaagtttaatattaaatttatgtgtatattataattttgatcacgtttaaatgatttggggtacaaatcgacggtcaaggatgtggttaggtccaaaatgacatgtccaaaggttttaggcttttgaaatttcatgtggttctagtagtataaattttggagtaaataattgaattctcacaagaaacgggaaccttttttatccgtcatttctggaaatcatctctctcgtttttcacacgcacactttttaaattattaaatagtgtgtttttgaaaaaaatatacaaaagtatctttaaaaaatcatatcaatctattttttgtagagaaggtaaaacttaattaattatgtgtctttttgcgtgccacaaattcacccttttgcatgccttagccagtcactgaatttgtttgctatcttttttttatatcataataatgtcattttcaattatacctttttttcaaagttgctgacgatgtgtctacatttagtttttttttttgacaactttgataaatacataagaaatcctaccaaaattttgctaatattaccaacttacttattttatctacaatctaaacagcccctctgtcttactcatgactatgcaccacaagtaccaaaagcattgtaaagaaaaaactggaaattgtggaattcaactccaaacaaatctagctcatgaaagatgagagcaaggtcaataatatagcctactgttggctccaaaaaaatacccatatcatctataataagcagtgtagctaatgtatatataatagaaatactataacacgaatattttattgattcgtggaacccaccatcttctcatacctcacattctctttctccttctatcccctcacaggtcatgtcttcttcttctatcccctcacaggtcatgtcttcttctcctattccctcgattcctgtcaccgacaacgaaagacagcggcggcggacacaggagatggcagcggctaggccgtgcaattgaggtggaagatggcgacggccgggcagcatggcggaggcagaaaacaacagcggctgtgcggcgggcgacgggggcaacggcagccgggtcgcaaggctaaggcggaagatggcggcgaccgtgcggcgggcgatggggggcagcggcggctaggccgcacaattgaggcggaagacggcggcagttgtacgacgggcgacgagggtagcggcgaccgggtcgcgtggctgatgcggaagacggtggcagccaggccgcgcggcggaggcaaaagacggcggtggttgtgcggcgagcgaccggggtagcgacggctcatgcgaaagacggtggtgaccgtgcggcggacgtcggaagacagcggcggccatacggcaggcaacaagggcagcggcggcagttagcgacggaggcaggcaacatcgcagcgaaaggcatggctgatgcgggagttggcgaggagaagaggccgcgcaaggcaggccccacagtctcctcgagcggcgcgtgcagcccgacaacaaattagtcaccagcttactctctctctcttcccctttctcctacagatcatcacaaaatcctacatggaactactaccgccaattattgtacctgctctgatgttacacatcaacccatcaagatatatcatttgttttttactgggttgctctggtcctgtgcatccaagatgcgtttcttccactgtcagttatcacttgctttaaggctgaagaatcaatctcccacgcagcatatctgataaagagtcactccacacaagaaaccatacaatggaatctgttctctcctctctttcaaaagacaacaaaaagaatccctaaaaagaaaatcggaacaaaacaaaactggcttcatggctttacttataggccgacccaatatgatcgaccattgctgttatggattggtgatggagaaggtgccgtcacagcccactcgtaccacacctgtagcaatgcgggagatgagatttcaggtaaggggtattcaaacatctcataatcaaaagcagtgcgataaaccacaatacctttgttgcaccgcagcatcgccaaaagtgcacttctataggcgtcttcgacggtacgtagatgggctttctcaatgggaagaagatcgggaacctgatgagatacataaaagataatattgaaggcactattcaagaacagttattgccagcacataaaaatcaggttttgccatttagtgtaccagctaaacatgtttggtgtagccgtgtttggttcaattccaagatgaacatctttatacaatacggcatcaaaatatccagcaaatcctgccaaaatgatgggaatgagtagagtcaaattctgccaaatatatagatgtttctaccttgtaacatagcaaagtataatcacaagtataactcaatagctacataccgtgcacgaggcatgatcccgtctcttgtggtatctcaaatttcaacttggtatacctttggttactagcatttggtgagggatttggatgatcaaaagtaaaaacctacatgttttaaaatggtgataatcaaatgaaatagttctttggaaaagataacatatcacaaaatgtgataggatacactattgatgagggataaatacagcagaaactgtggtcgctcaccgattgtgttggtgcaagtcttgctattcggtgtagtttgacaacatatgcagtttcaaaatgtgcaatatctttatgtgctttgatctgtataaaccaattcacttcaaactccataaatatcttacggttatcattgatatagtagaggcacttacatcgttgtgtagttttgatgctgttataggttcaataaagctagtgtatctgcaaaggaacataagttatcaaatgatataagaacaaaaggatatctgggatttaattgatccaagaaagatgaaaatatagactaaggacagaaaaggtcagtacgatgaaggaatagaaatcccatctggcttcaagaatctctgagcaccatctagacactcgggagaaagttcattatcaccaaaggaaccaagcaactcactgacctgtaccatatttgcatataagccattgatttaaccactttgaaaagatatgaaatgtccatttatagcagggatcaacataccaaaatatctgctttctcaggggcttcccagcaccgcatgtcacttgaaattatagtaaccaagctttcccatccttccaatttgatcaaactctgtttcaccgccccaaagcacatcagatagtcatcatgtaatcatatttgcacacgtacaggataaacaggagaaaaacccgactatcaacaaaacataaggacaaaggattgcaacaatgattacactgacaagctttccacatccaatcaactatctgagaacgaaaatgacaaatgctgtattcgttgaataactcacgtgaagggtgataacagcattaggatttttctcgacggcgtatacttttagcttgcggccagtttcctcagcagcctgcattgaatatgaaagcatattcagatagtgaagcatgtatacggaaaaaaaatggcatgcattgcaattgcattatttaagcacaagaacattcgtcaagatttttagtgagttcagaagcttcattagaaaaggtagccacctgtaacgacgctctcactagtggcccccggcctgctccaacaaccatcagcacctttatggaacagtaaatgaagttaaatcatagaattctaaaggtaagataataagaaaatagagtaacaagtaacaataggcaatacagaaacaagacatgatttggcgaggaagataaaatatggcaggtccaatcttactgtttttgttgttgagacatcatcatcggaaactctatcaaccaatgccttagcaattgctctttgatactgttcatatgatgaaaaacagaaaaacattaatacagccaacactggtattagagtttatgttgaacaggaaaaaaattaaggggaacccaagtaccccccccccccaaacacacacacatgcacacacacacacacacacacacgcacgcacaaaaaaaaaaaagaacgagttttacccacactcatgtctctaggtagcattgcctctaattcatagttaaatcattgccgggaaaccacgataagcacggagtctagttactatcagtgtgatccagtgcagatgcatacagccccatgactggtgctggcctacacagataacggggctacaagcatactgcgactactatttctgtgtcatgacaaaccagcactttgctgatcttaaggacagagtcaagtctcaagacctgcaagctagtatgaatggaacatgcctgcattgtggtttctttgctcaagataacctggggaaacccaagatggcttataccatgcagacaggggaaaatgtcaagtgatgtggtggacctagctgtaaattatttctatggccatattggcaaaaaaaaaaaaaaacggtctttggagatgcaccggaacaattacagcctttaaagtgtcatttttttcttagtggcaatgtttggaatgggaattgctcgattttctctaaaaaaaaatgagaagcgataatcagaatgcccgattcgaaagataaatttgctgtcgctttaaattagtgattttcacagtaacatttaaagatattcaaaacatctagcagaaacctgggtatatttcacggtatctttctcaaaagtctcgtatgtctgagcttccaaattgtccattagaggctgcaagaaaatgtaatgttgtgaggaaagattaaaacaaaatgatgaggggaggagaaagaagggggggctacagaataggaattacctggagaggagattgcagaaaatccctataattgatctgaataaagcaaataaattcaaggtcaagaaagctctcgcttaaatgaatcagctcatgggccaaatcagagagatagtctgataaactaaatacctcaaagcgttcctgttcaggaagtgggtccatcctctgatatatgtaagcaatgtagtcaaggtatgggctcaatgcatgccgaacagcagtatctaaaacaacagtttaggcaacagataagtcatgtgctaaagaaaaaatatacattttgcagtgcgcctcagaaattcaagcagctaatttcatttcaagtcctgacttttgctctctgaatttgtttcaaagttaagtttgtagagcaccactattacttaaaacatattgaaaagaaattttcagttcatgtataaatccagttcatgtgtggttgaaatacataacaaaaccaataaattataaatctcaaattttgcaagaattaccttcagtgtggttttcatcacctgagagcactcctccttgggatacgttatgatttgatctcccagatattataacctaaagaaaaacagagggtgaaaaatccgagagaaaaggtacagtaagatgccctttgaaatttggaatggaaatggaggcaccctgtgcattgggttcttagcagaaaagataagagaggaaaggcttgatagaaggaagcacaaggaacacacctgaaccgaatggttaaaaaatccagtaagcagcttctggtggcgctttgacaggcaaggataacctctggcatttgtcagaaaagcctgggagacgaaaaatcgtttagtgatcagaaccatgaagggttattcttatctccaaagaaaggagatcgcatgtcatctttaattgaataagtagtacagttacatttgtttgaagaattgcagctcttacaggctccccaaaccaccgccctagtgaattcatagatggcagtgtgctcctgataagtgaatagccaacctttgtaatgaaaaccaaaactataacatgatagatttattatcagtgacatcttcacttggaagaaagcacttggtgcaacaatgcaagaacatcacttacaaaacatcaagcgccacacacagttgactgctatgctcacataatagtctaaatgaattccaccattcccaagagtctacggtatcactctgcaatttaaaagggcactcaagagtgagatttaccccgcacatgcagatatataacagtctgctgcttaacagtccaggccagtctagaattatcagaaatttaccatgtcgctattatcttttgctccatcatggtcttcatccataggttcagacttctccagaggtatcctaagccacaacttaagaaagagacagaacaaacaaaagctaaatgttcatcaaattgaaacatttatgacatgcacaatacacaacatatgtaattgaaaatggaggaagatacctgcaaattggtcaggccttgcaaaatatgattcacaactctagcatagttggcacaagaagatctcttgggaggaggaagaacgcacgcctgaaagaaaatgcatgcaatttctaggattcagaccatgttttcaagaatgcatatgggtcagtctagctcccaaacacgccaagtaaggaaatcttatactccctccgtttcacaatgtaagtcattctagcatttcccacattcatattgatgctaatgaatctaaacatgtatatctatctagattcattagcatcaatacgaatgtgggaaatgctagaatgacttacattgtgaaacagaggaagtaggaattattctagtttctagttatggacttcggaagcataactaatttacacactgacaagcttgaaaatatgcataaatggtggagaactcttatacatgacaatcgcccatcaacactatcaaaattatctctagcacttcctggttgcaaaattgcaaaagtgatgaactctccagagcgatttccttgatgcgcaattagaaactcccattaaacatttaataattttgtgaaattcactgaatccaacggacctgcaacgagagatgagacgcccacgcaatctcctgcttcagagtgatctcggagtccaaccggagttgctcgtcctccgcatccaaatcaatccactcactgatcttcccgacgatgtggctgctccactgggccgggccgaggacgaggtccgacgccgccacggggaggacggacccgggcgtcggccggtagtcgggatcaacctgcagcagcgccaccaccaccaagtgagctagtagtctcagagaggaggcggaatcgagtaagggcggaggcgctagtggagtagtactcacgaggggggcgaggaggaagtcgaaggaggaggagagggagtgggagaggacggcggggagctcctcgccggcggggaagtcgagcacctccaccccgcagtagcgggactcgctcttgtcccccgcgcgttgccccagcggcatctccggttgccttcttctcctcctcctcgctggtactagtcgccgacctccgccgctgacgccgccgccgccgccggggatgggcaggaagacgcgttggctggggttagggtttagggcttttggtcggcggaggaggggaatttagggcttcagcctctctctcccttcaaatattattcaagcaaaattatttatgtttcctattcaaatattcaagtggagaattatttattgacatttgtaaatttgctactgttttttttaattttgtaaggataccatcgaatgatcgttctagtggtaattttacatatttctagtggtagttttacaataacgatttaaacaagtggcaaatttgcaattgttgtaattatggatgtttcagtgtttcccttgcaagttaagcaaaataaaaaagttgcttctatccattacttagttatcttgtataaatctttttagtatttattgtagtgatttcagtacttcgaatatattcgaccaatcgttttggtagatttgtaataaactactcactttggttataaatgttatgacaacatttggttaaaatttaaaactttgatcaacatttttatattatattaagtttataaaatctatgatattttaatagtgcttttcaaggtaaatatgggtataccgtattttttctctaacccacacattcaagatattattgatggttgaagtgttagaggtccgacaaaatcttgtcctagatatttgatgttttggggtaagatttgttcagacttttaaaactttgataatcaattatttctcaaatgaaaatgtatgcacaaatactagtcttgccttggaaaataccatcccatgatattgtaaacttattctaatataagattgattaaaagagttttaaaaccaaatcttgtcataaatatcaaatatttatgattgaaggaagtatttgagtgctttgtggcatttcatggagatgctaattgtaagtactttcgaaactttagaaagaaaataaaactagctactccaatcaccaaaggcaaccaaaactatttttaaaatggaatatttgcattatgcaataacttacattgtacgagccattgtgaaagaaataacatatttaaaagaatatgccctgtgaggttttattataactagataatacaaaatacattattagagaggggcaagatgcatttcccctaacacgctaaagaaggcgacatttgaatctggtgagttcataaccattaagctcataaaccaagtgtgctcactaatgtaccagataagagtattaaaattcacctatcttccatttttatgtgtgctctagtaacctcgttttgccgtggacaaaagacacaaagtgatatttgaaaatatactggaaaaaatatactactgccgcatatcaaagaagcaaactcgtggcaacgcacgagctcgtggggttgcgcagcgagcttgctgcctaatcctgaattaatgattaataattgctaactaaagaaatactccctccttcccaaattgatcatcccactagcaaaaaccaaaaatgccatattaatcatcacatagagctagtgccattggtaatctcgctgacgcctcctcgtaacgcatgcatgcatgtatggaattaatgcgtgtaggcaacgaaactggccttccttaaaatgcctatgaagtgtggactacttcacaccgagcgcattggcaagatcctgaatggttgtgcgatctctcaaaggcacgtctctgatagattccatatctatttgtactcttttgcaaccacaacttgtgagcaacttgtttatcacaccttctatcccaccataatcctgtccactgcgtcatacttgctgcacagctctaactggcaaatcaaaattcaatgcaactgccttggtaactccacgttgcagcacaagaggatctgtctttgccaacaattgtagatagatggcgatcttcaaatcatccgggtagtatctccatttcttcacacttggacctgcacaaatcaaagcagattaataacctacaaattaaatgactattgaaaatcaaatctagagtcaatattcaaaactagaggtaaatttcagaattatagataaaatacataactaggggttaaattgaggactagagtcaaaattcaaaactagaggtagatttcagaaatatagataaatatcagaactagagcttaatttgagaactacagacaaaattcaggacaagagcttacattgagaacgaagtcaaaattcagaacaagagctgaatttcagaactacagacgaaattcaaaactggagcttaaaatagagaactagagcttactgtacaaatactagccataattaagtactgatgttaaacatcatgctttgtacaaatactcaagtgtttcagaacttaaagcaaccttaaatttgtaaccgttgtagcaatcaggcaatagattgggtactgatttcaattaaattatgagcaactaactactgaaaaatgccaattagagttacaatgtagaaatgacttcatattttcgtgttttaggaggaaattcagaactataagaccatttaccgttctcatcaactttgaaaccagaagaattagattatcacattctcataaatacatagatttaccaacatcacatattgttatcacattcttttgctagaaaaaatgtgggaagtgttatcaatatgatattatcatgtataacaatgattgataaagaagaaagtagagtattatacttcatattaatttttttgatttttttaaacaagaaaaacaaaatagtcccaccaaagtacttttttttttccttcaaaagaaccttttaggcattctgccaatcctttgttacactacagtgttttttctgtcatggcaaggttgccctcctgatcttgagaatcaagggtcgaatgtttatttttaaaaagtttagaaaagtagtactgtgctgatggttccaacttaaaataaacatcatgatatcttttctttagtactagtatcacctgagagtgtttttttcctttggttacttggatactccacaaatcgaactttggtccaacctctattcaaagctccaaccaccgatccaacgtcacacaaccttccaggctatcagctgcactgttccttcagcctggggcctcatctcagtgtgatgctgctgacgtgtagccaatgaggcaaaggcaccttctgcgattccgtacctgacaccttaacagattattgtcacatcgatgcaccatgctgtcctcattagtttaactttctccattcgctggttctcccctaattttgcttgttcaaggagattaccacaaccaatgcatttgtacaagtattttaagcatctctctcaagttctccatgataactgtaacaaaaagcaattaaagaaacaaacaaaaacagacagaagcagcagcaacaagaaaagaccagcactagtagcagattaccaataccaaggcgtttgagcgtctcagagtggagtagtggggaatatcagagtagtagcctttttatgctttgcttttcttttggccttttaatctcagcccctctgctcaacagtactagatgtatcttggattggcatgtatggtgaggaatctttctagtaccttttttttttgagctgaaaaacctcagttactaccactctgtgtgctaatcactgttatggagcatatatcctctcttcagcttgcagctcaagagtgtgagagtgttgtctaggtgatcatcttctcctttttctgttcagttcttggttcacactgtcaaatcttttcttctccttctcctttttcctgaaaaatatcttgttctactttcccctcctgcaaatcctgggagcaatactagaaaagtttttctcttgtgtgctgtctgtgcccatctcttcgtttggtgccagctttggcaaagccctttattatcactctcatctaatctagtatctgtcccctgtgctgtcctcatcagcaaatttactccctacctgagcttggtatgctagccattaatgctctcccctggactgatgtgtgatgtgagtccttgcatttagctatcaaaggaaatctcctttcgtggtcaagctttaggtggagtttgatgagttcggctgggcttcatttattcccaaagatttgagctcttgatgctgctttaatagttcagagattccagcgtccttcacttcttgcagctcaggaaaggattcgatctttgagcttctagtgtttcttggagctttgctcttcgtgttcatcgatcccaaaatcccccttttttgctggtttctttagcttgcctgatcaatcatcccaagatctgagcagaatgggttcttcttggtggtggcatggaagggcggcggcggcggtggcgtgttgggtgtggctggcggcggcggcggcggtgggggtggaggcgataggggcgaactgggggacgcaggcgagccacccgctggcgccggacacggtggtgcagatgctcaaggacaacgggttcgacaaggtgaagctgttcgacgccggggaggacaccatgagcgccctgaggaagagcgggctggaggtgatggtcggcatccccaacgacatgctcgccgccatggccagcagcatggcggccgccaacaagtgggtcgaccagaacgtctccaactacctcaacgacggcgtcaagatcaggtctcactcactcactcactccctgaagattcttcagttcactctcaagcagtttttgctggggagctaatcagcttactctagtagttctagtttcatatggccttttaagcatactggttaagtctagaaagcatcaggtatagtatactcactcactcactcactgaagattcttcagttcactcactgaagattcttcagttcactctagtagctcttgtgtgattttgctttttaagcagtactggttaagtctagagcttttggtagagggttggcattacgttcaacctggttgttctagtgtgatatggccttttgagcatactggttaagtctagagtttttatgtagagtggttagcgttgcattcaatctgtgttgattggttcctaccaactgcagctcatatttggtagagtggttgagttagaaaccccctgtagtctatagcattgcatttttcgtggctcacgcgatttgcacccttgctgggatgagtcagttgagcatgtttgtctctggaggcaaaattaccacaaagtacagttgtgttttatccatctgtgcttgtactcctgattaatgcatacaccatgttgggagactttcttgctatcattatactgttagtaaagaattttgctcctctatggaattgtagcaagaatatgaggtttttgcactcaagtgacactatggtagtcatatcatttgggtgaagtttaccagttttttgttttgaatatgttcacaaacaactgcttctgggtagtactgttttttcaactgaaactgagctatcgatatgaccagtagcattcagtagtatgctatataaggtggaaggtatggacattgctgtgcggaggataacccttttttttgacatgtcctctttattcgttgaaagagaataataattgtccccactctgaattgctgcatgcccgcatctagaccttacataagctctttgttctgtcactatgctaatgcctcttctttcacttataggattttgtggatcactggatccccttatgtagatggcttataaaacctcccattccttttgcttgtcatgtctaattgtacacaagggaactgtgtttactaccaaaaagtatcacacacttatttgaagtatgagtggatctgttgcttttcatcattgcgaactgaacaagactagattttctaactaaacaatgctgtgttgtgtttgtgttggtaagaaattttcctacatgttattcacacatggagtatcccttattatacatatatcaaaacagcaactttataaatatatactaaactgctaagtaacatgacctggactaacattatagagcataacaactgaagttcactgaatactcatgctgacctctgtgtgtttgtatgaaacgcaaccatatcatttcttactagtgtgccacctccaagctggtggccaagtttggttaccactaatgagatgttgggtgtgtgcattagttccactctgactttcctggatttgaatcagtgacctatggtttggagcctcaatataattgaatcatccaattgttccgcactcttaagaaaagatgattgacaacacatcatataactcatgttctatatcccaccaactttatcctgcaagttcgttcctctgtgatgtttactcactgaaccatctgatctcacatcttggttttcctattgtaatatcaggtatgttgctgttggtaacgagcctttcctggagacatacaatggaagctttctgcaaactacttttcctgccatcagaaacatacaaagtgcgcttgtgaaggctggcttgggtagtcaagttagagtgacatgccctctcaatgctgatgtttatcaatcatcgactagcaagccttctgatggggacttccgcacagatattcatgatctgatgctcaccatcgtaaaattcctgagcgatactggtggagctttcactgtcaacatctaccctttcataagcctctattctgattcaaacttccctgtcgactacgccttctttgatggtgccgcatcacccattgttgatggctctgcgacatacacaaacatgtttgatgcaaactatgacacacttatatgggctttgaagaagaatggctttggaaatctcccagtcattgttggggagattggatggccaactgacggggacatgaatgcaaatattcagatggcgcagcacttcaaccaaggcttcctaacacatattgccacagggcgaggaacgccgatgaggcctggaccagttgatgcttacttgttcagtctaatcgatgaggatgagaagagcatacagccaggtaattttgagcgtcactgggggatattcacctatgatggcttgccaaagtatcaactgaatcttgggcaatcacatggccttctcaaagcgaagaacgtgaagtaccttgagaggaagtggtgcgtgctgaagccttctataggccttactgatccaaggctttcagatagcatcagctatgcctgctccctggcagattgcaccagccttggttacaagacatcttgtgggggactggacaccagaagcaacatctcgtacgcgttcaacagctactaccagaagaacgatcaagacgatgtcgcctgtgggttctcgaacctcgcaacgatcactggccaagaccccagcaccggaacatgcagattcggtatcatgatcgaggttgactcggccttctcgtggaagctgcagcatgttagaagcagcaacctcttgatgcttctgctagtgcttctccagctttgcctgtcattctcatagatgcttgtttcacaagagatatggctgtagtaagagcatcagccatctggcaggaggataaggatatttgatgtctgctgtcagtatgttcattcatgtaggaaccttttctttttttgctcttttttccctctttatttttccctggtggatgccgcgaacccgctatcgcgatcatgcttggattcttgttagtgtagcctttgatctaccagtgccattgtgatgaggatcatgccttgaaccattgattgacaatcagagatgttgggcgatgttgccgaacctgcatgcaatcaggcgagttcagacttcagattcttccatgtcgcattatgccttgatattccttttcagtttgattctgcattttctgctccaatacttcagaagagaggttatatagctatgaccactcagatcagatggcaatggcgtcaaaaaaaaaaaaaatctctccaaatttaccagggcagaatcaacaaaatgtgagtatactaagctgcatcgatccctgcacactgcatatcagaagtcagaaaccacactactgatctgaagcaaacaattcgagaggttcttgattacctcgattgattttagctgatatcaggatgagaaaagttcagagaaagctcgccgcagcctgcggcctctcagaactgcatctccaatccccgacaacggccaagcggttggagcctccgtctccggcatgcgatccgcgcgaaatctcaccctccgtcgcggcctgacgaaccctgctccgatcccctcccaggttcgccggagctccgccgcctcgtcgggggatcggagagcgagaaaccgagaaggagcctaattacaaacatgaaaatgagagggatttttatgtaaatgtaactcgatcttagattcccatccaacggttaacacttaacacaagtccaatgatattatttttttcaaataagcccccttctttggatcactgccaactgaacaacctcatctttccgcttacacttatactcatatcagctaaattttaaatttgcagctttaaatttgagtgaattccctgtgtacccctgaaaactcactcaatccctttcatacccctaaaatttacccgatcccttctgtacccctgaaatttcaatttgatcccttccatgcccctaccgttacattttccatcattttactgttacgtttggttgcaaatgtctttttttgcccttgatgctttaggtttaaatataagcttcaaaaataattgaaaattttgtttgagtgcacatcgtgtgcattttataaaactaatgagactaaataattagtgcagaaaattttgacataaattttgaaaataaaataaatgtaaaaaaaataaaatttttatttgaaattttaataggacaatggattttttttatcaggagcattcataaaaaaaatattatgaacattggtatacctatctttatatgaatgctcctcatttttatgaccttttttttaaaaaataaatacgtattttttttatttcattatctaaaaatatttttttgggataaataatgcatcgcacaacaaactcataactataatagtctcatgcgagaagcttttatatttttaataatgtaattcatgaatttctttgttcatccaagggtaaaatggtcatttttatagaaaatacacggtcaactaatggtcaactgacgggaggggtatgcaagggatcaaaatcaaattttgggggtatataaggaagtaagcaaaattcaggggtatagaagggattaggaaaaatttcaggggtatataagggattttctctttaaatttagagttgattttggggattttcatcgaagtttattcttcggtgttttcttttcgatagctaagagcatctccaacaatagctactattttagagtccctaaaggttaaatgggggctgccccaatttcctcaggactctaagaatggttctaactccagcaacaacatctatttcttagcccctatttctttttctcctctattttatcttataatccatcttttatgtttagtttaatatcacaataatgtaaatattaatatttccaacgcatagaatttaatcaaatttaaattaataatttcaaacaacacaattaaattgaaatttgatttttttttataatatcacactgatatgtgcatatacgtacactagtgtgagtgcatggatgactcactagaatgctcaatcagtccatctgttgcggctagtagcagtagcagttcatccatcctacactcaatatccaatgatatacatgcatatatggatgcatataatcatatatgagctggtcaatattaagatatattatatccagtgcatacacgaaactgcatgaatatatgcaaggagatatagtagtagctccttctagatcagcatcaaatctcagttggccactggcggcagatggctgttcacacttaacaggaaccaaaccacgtctcatcgatatgcagaaaaatccatgcatacgtgcatccatgcaggtgaccaatactatagcagggcgatggccggattagagcagaatcacccgcaacaagacggccggcggcgtgcaagcaatcgcgcgggaaggagcacgcgtcgtggaagcattcccccgcgccaaagaaaattggataggggctggggatagagcccccaggcctaggggctgtaggagggaatttgggaggcttcctactttggggccttaagtaggggcctgttggactttattttttagtctcaacctctcaaagttgtttaaggtctgtgtttaggagctttactgaacatgctctaagaacgcatatataaaagttctattcataagttatttttcgtcagctaaaatttgaatttgcaaccttaaatttggagttgattttggggattttcatcaaaatttattcttcagcgctttcttttcgatagctaagaacacatatataaaagttttgttcacattttttttttcaaatataccgtttagataggagtatctatcatcatttttttcgaaaaggaccttatggttatgatcaataccactccaagagtcgtaaactttgcaaatgagcccctgttttggaatgcattatgcagattagcccctgatcggctgatcgcggtgctcttccctctcctccctccgagatcgccgccgctcccgccggcggcgagatcccgcctcgttgcggcgggcgctcgccgtcgctcgaggcagcgatctccatggtattctcggcgagtgcctctgcctcctgcctttgacggcggggagcgggatcctctcgctcgccatcgccggaatcggggctcgacagtggcgcgctacgccttgtctacctctagatccacgcacctggactagatctcatggcggagtatatccaaacccaacgatctagataacttggagtaggaaattgctggctcctcatgaagattattgttccatcttaattaattacggttttgatctagggagtacctatacatctttcgaaagatttttatgatcgtatcacacagatttttaatctttggattaaaatccgatagatataataaaaagcaaaaagcaattaagaaacaccataatggacactaaattaccatatcctcaagaaaaagaccaaatccaatacaaaatttaaaatttacatgcgaagattcaaaaattatagtgtaacttacaaaagttatagtgtaagtttcataaattacactgtaacttacaagaaaatgcattgtaaatttgagtgagaaaatcgagtgagagataagaaaaaatctttcgagtgagatatagcaaaatcgtttgatctatgtgaaatttgcagtgaagttcatctgaatctgaccactcttttgtgttcatcttcttttaccatcttaattacagttttgtgataaaaaattcacttggctattaactattaatcatcctcctatccaattcaaggcttatgccttcatatatgtatctctgaaatcgtatgttcagttgttcacaagtgttcataaatatttctgtctgcaatttagagattttttgtttgtttgattccttacatcaccaggcccattttattttgtagaaagacgtggtgtagattgcatccacgactccctacttccctaccgctgatgggggaggggatcacgcaaaccaatttttacagtcccaatggttgttaattaaactaatcattttttgctactttcaagtggtatctgtgctgattgatctttgtttttaagcaggaaccattggggaaccaaatctacgtcgccttcttcaattgcaagtagccaacatgatcaagatccacttgatatagtagctgattttaacacatgccttagctgatttaacaaccgcccgtttcttattttcgggaatacgcaaaaggcttgcatctcattacacaactgcctattgttcctatggagtaattatattttgcagttgcagccatcagtgtcacatcaaaagtgctaagcaaagaggagcaccacctaagcacaaccgacaaaaggcagctactgcaacttttggtcctatgtaaagatggcctagaagaacagaagctgagtgtcacactcacaccagagcaagacgagaaagagataagcattcatttgcatgcaccaattatgaaatgcaattccaaggtaggcatgggcaaatgtgtatcatcacttatacttggcactaacttgttgaggtgtgcagactgcaggctacaggaatgtcctactctttccctgagaaggtgatctgaattctgaattcatcatacaaaaggttgtgcctttcttacaggggatttgcttcttttgtgtgagtacttgaagtgtagtggccatattgggctggaagaggcagcataccaacagtaagcagagctgttggtgcagcagtaacagtaaactggtgagtatagcttgatacattgagcactgttggtttgtgccagtgaagcacatgtggctagttgctgtgtgtgtgacagtgcaaggaggcaggccacccacttggcatccctctttgattcctcctgttcatttgaggctcaggtggggcacagtgagaaagagagagagagagagagagagagagagagaggccatcttgtgtgtgttggattattgtgagtcttgtctttcttatctatagttgcttttcttcattgtcttttggtttaaggtcctcattttccaccagcgcttgccagggaaagtaattctggaggaagacacagattcttgagggaaaagaggtgagattcttgatttcagatacaagaggagtagagtggttctttgtcccctagccctaggtaggtgaaaaaaagcttcctttgctaattgctataggtttctttgtataggtgccccacagaaaagaaagaaagaagctacttgacttgacttggtataggttcttttcctgcccctctgatttgatttgcatatgctgctgccaccattgcagtgctgctaacatggaagaaataatgcagcagccttgaggtcaggtagtagtagttcttggtggtgtggaactgtgaaagatctgagcttgtaaaatctttcatggtggtgagaagtgaaagtgtgaaactgtgataagatttgagattgtgaaattttgggggtggttctcttgtcatgatgtatagtagggtccagcactggactggttgatgttgttggcttcaaaggttagggatagagaaagcctgaagaggagaggtgtagtaggatataagatctgagaaagccagagatgagagtgaggagaaggcagtggtgtggccaagcttgaatgctccagtgaggctgcttctctggctgccaagctgatggacgcgccgccatcgccagatcggctcgccggatcagtggagctccatgcttctccaggctgctgctgattgagagagagagagagagagagagagagagagagagagaaacagtttttttttttcaggaggaattcatcaggaatctgctgtgctccttttctctgggagagaagcaaagagcaggtacttcactaccccctccccccactgttgaggtagttgtgctttgcctttcttgcatctgaaatgatgatgttgctgttcttgccatgattgatgattcccctgataaagctaagctagagtctgcatatatgggcattcattgatactcttggtagcacatcttgtggtggttgtacttctctctcaaacttcaatgatgcacagttgagtcaagtgtcagctatgccataaatctgtcctgatttctgcaacttctaattgagttatattttctttttgagtatctgtccttctcatatttcattttgttgatttaaaggttggagcagcagcagctgggatctgtaactggcatgggttcttttgggatggactggaatcagaagagctcggtgttgtgggattgggagaatatgccgccgataggaaatagcgcgaacgagaatcccaagaatgtgatgctggctgaatcaaaacttgcaggtgttggggttgacataggccatgaatcaggccattcttctggtggtactttctcttctagctcagagattgggtatggttcatccaagagttccatatccgcgtcgatcgattctccgtccaaagtggggaacaccatagagctcaattttgcatctgcggaagagcatgataagaacatggacaagggtaagagtaaagttgatgacaccggaacttctcgatcaccggtggtagcagccaatcgtgtagagcccttgattggcctgaagcttggcaagagaacctattttgaagatgtctgtggagggcagaatgtcaagagttctccatctggtgtgagtgtggctaccccatctcctggtctggccaagaaggtgaaggtggctcagcagaacactcagaacccacactgtcaagttgaaggctgcaatgttgatctctcttctgctaaaccttaccatcgaaagcaccgagtctgtgaacctcacagcaagactcttaaagtcatcgttgcgggtcttgagcgacgcttttgccaacagtgtagtcggtgagattttcttcttggttactaaatatgttgtctgcttgttatcttgaatccgatcttagcacccttgattaaggtaaagtaaaattgttcttgtttcattcttttctttgaacttctgctgtttttgtaggtttcacggtttagctgagttcgaccagaaaaaacgaagctgtcgcaggcgcctccatgatcacaatgcccgcagacggaagccacaaccagaagcaatttccttaagttcgtcgaggctctctacattactctatggtggtattaagattctatttgcattatagttctgtgaaattgaagcttattttgtcatctacccagtttaaatctcacccccccccccccaataccataaatattgtcaccgaactgatcggtactaaaacatgggaagtttcaactgtgccatctctttgtattgttatttctgcacataatacttcagaaagaaaaatcactctgaaaaattaacgaattggagcacagaagttgttgagtatctgagtaagcattaactaaaatttcaagaagtgcacattgaatttagtgtacccgtaagttgtacaaaagtggctttaacttccataataggcaatagtacaatagtaataagcaacctatttcttctcgttagtcgttacatctgtttagcttagcgctgaaattgttgtgacttgtgaccgtcctaagcagatgcaaggcaacaggcaagttttctatttggtcaagctccttatggtcagatgggaagctgtgcaagttcttgggataacccagtaccaggaggcttcaaatttacagcaacaaaagctccttggtcaaggccaacaatagctgccggtgttgatgggacgcatgtatctaatcagcaggcatcgggcaatgtactgccacatggagcacatcatagttttgatggtctcatggcgttcaaagaaaccaacgcgaaggtccttaaccaaggtattttgtttctctagctatttatagatgaactttccaaaagaaaaaggtgagaggttaacattctgaaagcaaaagatgagaaaataataataatgttgggtctttcacccgcataaaaattgttctcacaactccttatgaggaaaaagagcatagacggatgcgcctatgtagtcctagaagctattttatatgatggtgcctcttgggatgcttcttcttgattctagctgatcattggtgtttctgtgaagttattagatggtatggaactctatgcacttaggacgtatggtcgtatcatttcattagataagtttttcccatgactacatgtctggttatttatttttacaacacgagaacctgattgttgggctacgttcttctccatgttcttttctttgctactgacttctgattaaactcatcctttgtctacatcagcttctttttcttaccaaagattgatccagctttatataaaagccggagaaaagtcttacagacattacagactaagactgaaagaaaactacattagcttcttgcttgattttaaaagtactattgcattgtgccgcagcaagtgtccacataccacaatctttcccatgaaactcatcctttttagcagagctgtcaccatcctccagttgctgacaccttaacattgagtcagctcacaataatgtaggcacaaagctacaacatgtgaaacaaatttccggaccccactccttgcaatctaggacagcttgtagtgacgtgtgtaaggtgagtggtatatatcgatatcatagattggtttgaagctctgttatgttctgtgaagtagactgcaatcactgaaaacctttgcgttttcgcatgttattggagcttcatttgtggccggtaaccacccacctttggtgtttcttcatttggcccaactcttgtacaatgactagcaccagaatgtcctgatcaagcatgattctgcttcaacagcttagttgagtgtaataatgtgcatgcaggaaagctttaagcttttgaccaaaatggagggagtcgcaatctgttggataatctaatcatcattacttctagtaggaccaagatcctctacatggaaaacctgggctcatatatactactagaagagaggaattatcttcactgagatttttgttgcaatctgttcatagttaccatgatatatatgacttcaattccagctgcatctgctcatacgatcttttttcggttatttatccgcataaaacttacagttctactcactaatttttcaggcatggaagcttctgctgtcgcttccggctccgctagaggcccagactttgagcatgctctctctcttctgtcaatcgattcagtgggtgctgcaaaccttcagccaggttctcagattcaccctggtgtcaccgccattgccggcacctccaaccctgtcatgatgccatctccagcaatctggcaaggaggcttgtcccttgatcagcaggcgcagtttcaggctttcgaccgccttggcaacgacgacgacgaagatcatctccagctcccaaagccttcctatgacaactcccactatgatcagatgaactgacgatgtttcagatgtcgcgcaatcgacatggcttctgctcttatctgaaatttctgaaatctggaactgcattcttggtgttctgaagaataaaggtgtgcgagaaacttgaacttgaattgatctggttgtgttgtactctggttgtagcgctgccatgaaacataaacttaacttttgctttcctttagtcgctgtcactaatcgtgtgcttgaataatttcattctggtgatactttgtatcagaattgcttcagcaagtgatcatggtttcagattcttgatttcttgtgggcatctatgatcatggaacactgatcaatatctctacgcaaccaagccctgcactgtggcagtgattgctggcaccaaatggtagcgaacctattttgggtggtgagtttgcacaagcatttgttcaaaagagaccctaaaattacccaaaatttaatcatcatccgttaaaagcattgccgatcctatgactggggtccacgtgaaccgtccgatcggatctatgctgctcagagtcaagattcaagaggtggcatttttcacaaaggaccccattagaacgtcagttttctaagatacccctggaacgatcacaattcgcaacgcgaggtgaacttttacacatacatcccttaaatacgacattatttcacgatgatcagcacatattgttttcgatatcacagtgcactttcagctgtaaataaaccataatgctgctattatggtaatagtaagtttcaggtacagaaagccacgcaacacctgcactcttgacttcttttttttttgtttttaaaaagaaaataacttcatcagtatcatcagctagcagtgttgccggtcaccgatgcatcctgcctgcctaacaagactcggcagcggtactctccgagagcccaaatagggaatatgttcctgtactgagagtagctgatggcgcagtttttgctgaatgctccgatgatctcctgttgtttttttcaagtcacacaaaaattcattcagattcagaagctaccggagacagggacagcacttaacattattaagcataagaaaagctatcattcgaaagggtaaaaacaaaaaaaaaaccctcccagccattggccaacactctgcacctgaatttctgtgtacatttttcacgcacaaatcgagaaatggtccaaaagcaaaaaactcactactttgctataagagaagagcagttatgacttacttgctgagggaactccccatcctctaattgtaggttgataagaatcctagctgctcggtgcaacggcgctggatctctctcaccctgctccgatgagaatcaagatgttattgtcaaatgggaaacgacacacacaatctgttactgcatattttttcgtgaacacgcaaaaaaaaagtacgtcagtatattaaaacaaagcagagttttggttatacaacgcaaacggttagagagccattgccaagggacaatctgttactgcatactaaaatccacaaatagaaaatgtcaaacacgaaaagacctgtccggcatcaattagcgcaagcatggcccaactggtgtttactccgtggggacgttctccttcaagattggtgtaaacctgttttcgtggagaattacaaaaatgtttactacattaaaacgtattcgcatatatatatatatatagccacaatttaaagagttacagacacacttgtgctgtaacatcactggtaatttgatccaattatattccataatcgccttaattatcaacataggatcgatctccagattgcactgctggatttggagacccattagtaggcattagtgcattacctagtagaaagaaatgatcgtgtaccttacctttgcaagacaaatggctttctccccaaccaccacaaggaagctcttttgacaacaagaagttgcatgcctttctgattgcaggacagttctcgtacgttcttccagcagcaattaatcccttcgctccgaaccatgtccgagaagtgaaacaaacagcccaggagccgtacctgttgttgtgaatggatagtttttcacaatgtagaatgacagtagtaactatttctgcttttgagcagacattttttttttaaaaaaaagcaatgtgtcacatgttctcttctgaaaggagttcggggtacaaaccatgaaccatcacttctctgaatactctgaatgaaactatcagccttttggatacaattgtctatttcttccctgcggtgtccaggatagtgcttcctaaatgctgtcaaaccctggatcacccccgaagtacattccacgtaactgccagtagaattcaattcacattttctgtttctctcaaagattgataaagcattatattaacaaggaaaacagctatcgcatcttagtgtcttacgggtaatcaatcattatgtccccaaaggtctcagaaggattgagaatctgaattgtacaaaagaacatgtcaggttgtcaaacagtgtttgacaggagcgaacctatcaaacagtgtttttacagttaaccaaagacaatataattcaaccactcacctccagccaggcataagaccttgtgagttcatatgttgcaaaaccaccattgttattctgtaccaaaagaattacagacaataagcatactgatagacccatcataacataaatcaacagctggaggctttgatcattccacagaatggatatacaacattgagcatagaagcattaaatatgtagcatgagaaaatttattagccagtttgattaaaataacttgacaattcagaagttattatactgattaaggcacctagagacaagaggtacaagatttgaagcaaaatttgataaatacctaattggtactctataagttatcgcaattcataaactctacgtacttctccaatttactttctctaataaaaaaaagttgctattccagcttatacggagacttttgacatgtcacaaggggaacagaaataccctggggatattattaaataagaaattaaagaaaacaaaagttaggatatctgtaccatccaagacagcagacaattgacagcatcataaagtctattgacttttaatggttcaccaacaatttccagagaaatttttgataacaacaatgaggcctgaaggtaattaacaggaatcacatcagatagaaattcaaacatttagtaaaatataattcaaatgatgccatcaatgccacaaaagaacataatggttagacttagacgtgacatgtgaaggctataatggtaatactatgatgcctaatactataggataatttctacttcataaaccctgcaagaacaaagttggtttcttaaagaaaatatcgttgttgttaatactgacaacctcattcacatattaactacctttaatccttctgcagtgctatctgatacagcccaaccttgatcagcagtagaaaaggtccatgcacctttatatatatggcgataccggtaactcaaatctccggggcagtcatgaagaagctttcagcaaggagtaacatgtaagtaattaaatgatgaattaacctatttgcacaagctgacatcaagcatttacctgtgagttttttatgtagccatgggctaatttaatagtaggaccaaaatcttctataaggt

(The sequence listing continues in the following parts.)
